(19) United States
(12) Patent Application Publication
(10) Pub. No.: US 2020/0329713 A1
(43) Pub. Date: Oct. 22, 2020

(54) BIOPESTICIDES

(71) Applicant: UNIVERSITY OF EXETER, Exeter, Devon (GB)

(72) Inventors: Ben RAYMOND, Cornwall (GB); Neil CRICKMORE, Brighton Sussex (GB)

(21) Appl. No.: 16/638,357

(22) PCT Filed: Aug. 9, 2018
(86) PCT No.: PCT/GB2018/052269

§ 371 Date: Feb. 11, 2020

(30) Foreign Application Priority Data
Aug. 11, 2017 (GB) 1712908.1

(51) Int. Cl. A01N 63/23

(52) U.S. Cl. CPC A01N 63/23; C12R 1/075

(57) ABSTRACT

The present invention relates to Bacillus thuringiensis strains which are phenotypically stable and have increased virulence compared to the wild-type strains, whereby the increased virulence has been achieved by the exposure of the strain to a mutagen during one or more passages. Such strains are particularly useful as biopesticides. Methods for increasing virulence in microbial pesticides are also described.

### TECHNICAL FIELD OF THE INVENTION

[0001] The invention relates to Bacillus thuringiensis strains and their uses, and in particular their use as pesticides. The invention also relates to compositions comprising Bacillus thuringiensis strains. The invention additionally relates to methods of passaging microbial pesticides using selection among host pest populations to increase the virulence of the microbial pesticides.

### BACKGROUND TO THE INVENTION

[0002] Existing pest control technologies have limitations. The efficacy of microbial pesticides and genetically modified (GM) crops, in common with their chemical or synthetic counterparts, is continually threatened by the evolution of resistance. Some important pests have relatively low susceptibility to existing Bacillus thuringiensis (Bt) toxins prior to selection, while resistance has arisen in response to the use of microbial Bt pesticides in several species of Lepidoptera, especially in the diamondback moth Plutella xylostella. Increased resistance to GM crops, in some cases associated with failure of field control, is also beginning to emerge (1, 2).

[0003] One strategy for coping with resistance is to rely on the discovery of new toxins. A substantial range of Bt strains, possessing very diverse Cry toxins have been isolated and characterized. However, while many toxins are known, there are few good toxins that can match the potency and broad host range of one particular class: the Cry1 group. Most field resistance has been developed in response to these toxins; Cry1 toxins are the most common class of toxin engineered into GM plants (2). If the potency of this class is lost to resistance there are few similarly effective replacements. An alternative approach is therefore to try and modify existing well-characterized proteins to improve toxicity in resistant or tolerant pest insects (3, 4). A second, commercially important benefit of modifying currently exploited proteins is that they tend to be easier and cheaper to license than entirely new products.

[0004] In response to this preference for modified toxins several companies have used random toxin mutagenesis (‘directed evolution’) as a means of discovering toxin variants with desirable properties. Older methods of screening mutant libraries rely on a cumbersome combination of bioassays and sequencing. One successful recent approach modified ‘phage-display’ methods to develop a synthetic in vitro screen of mutagenized Cry proteins (5). This in vitro approach did, however, have the limitation of producing Cry proteins that were sensitive to insect larval gut proteases (5). It is also a process tied to a single protein-protein interaction while in general approaches based on protein engineering can only be applied to biocontrol methods based on the transgenic expression of modified proteins. The original and still very successful application of Bt was as microbial products based on spores and toxins. Artificial selection approaches to improve biological control products at the organismal level could still be valuable for strain improvement in the traditional biological control sector.

[0005] Microbial experimental evolution, while still a small field, has had a major impact on evolutionary biology and has addressed fundamental co-evolutionary, ecological and population genetic questions (6-9). Many micro-organisms, including Bt, can rapidly acquire substantial beneficial mutations in laboratory conditions (8, 10, 11). Experimental evolution offers a mechanism-free solution to overcoming pest resistance, and is potentially applicable to many insect pests and a broad class of pathogens.

[0006] Experimental passage of insect viruses has been successfully used to increase the virulence of biocontrol agents and to identity genotypes with improved action against resistant hosts (12). The high mutation rate of viruses makes them suitable targets for improvement by selection. One means of increasing the rate at which a bacterial pathogen such as Bt will adapt to a resistant or tolerant host is to increase its mutation rate. In evolving bacterial populations, hyper-mutable strains or ‘mutators’ (13) (which possess deficient proof-reading genes) are associated with a large proportion of new beneficial mutations. The theory that an increased mutation rate will confer increased rates of adaptation to resistant hosts has wide support. For instance, mutators are favoured by strong selection generally (14, 15) and in coevolutionary arms races (16). Mutators have evolved elevated virulence in a model insect host more quickly than wild type strains (17). Mutators may be more likely to confer increased adaptability under hard selection, i.e. when the phenotype of organisms has to exceed a certain critical value in order for them to reproduce. This type of selection may be prevalent in pathogens, which may have to express a certain threshold level of a virulence factor in order to access hosts (18, 19). High mutation rates are expected to be more beneficial in small populations where mutation supply is limited (18, 19). Bt undergoes very tight population bottlenecks in each round of infection (20, 21) so that effective population sizes may be small. Mutators have higher recombination rates (22), which can facilitate large scale genetic change. While mutators can acquire deleterious mutations and are expected to be eliminated by long term selection, experimental evolution has shown that they can persist in populations for thousands of generations without being eliminated by reversion or recombination (19).

[0007] A key recent advance in the understanding of microbial virulence has been the application of ‘social evolution’ theory, i.e. ideas relating to the maintenance of cooperative or altruistic traits (7, 24, 25). Micro-organisms engage in a form of cooperative behaviour known as public goods production. Public goods, in economic terms, are goods or services that benefit entire communities but which are costly for individuals. In bacteria this communal availability occurs through long-distance secretion of metabolites into extra-cellular space. Bacterial public goods include biofilms, non-sporulating components of fruiting bodies, virulence factors and enzymes important for nutrient acquisition (25-28). Critically this includes the Cry toxins produced by Bt, and to some degree a host of vegetatively produced factors that are regulated by quorum-sensing (21, 28), which are important for enabling these bacteria to invade the insect host. Two crucial factors are important for the maintenance of cooperative virulence: high relatedness (or low diversity within groups) and a population structure that facilitates between group competition (7). Relatedness is critical because with diverse infections competition between genotypes will favour “cheater” mutants that have deactivated costly production of virulence in favour of rapid growth. Population structure, the division of a population into coherent groups facilitates group level selection on traits that are beneficial to groups rather than individuals.

[0008] It is an object of the present invention to overcome one or more problems associated with current pest controls. It is also an object to provide an improved pest control. Preferably, the pest control will utilise a microbe, such as B. thuringiensis and the strains will have a higher virulence profile. It would be desirable for methods to be developed so as to evolve diverse strains of B. thuringiensis and enable selection of the most efficacious/virulent strains from a diverse pool and improve virulence.

### SUMMARY OF THE INVENTION

[0009] In accordance with an aspect of the present invention, there is provided a Bacillus thuringiensis strain which is phenotypically stable and has increased virulence compared to the wild-type strain, whereby the increased virulence has been achieved by the exposure of the strain to a mutagen during one or more passages

[0010] In accordance with another aspect of the present invention, there is provided a Bacillus thuringiensis strain comprising Bacillus thuringiensis kurstaki NCTC 17080301 or Bacillus thuringiensis kurstaki NCTC 17080302 or mutant or derivative strain thereof.

[0011] Preferably the B. thuringiensis strain has an increased virulence relative to its ancestor. The increase in virulence of the B. thuringiensis strain may be at least 10 times that of its ancestor. More preferably the increase in virulence of the B. thuringiensis strain may be at least 100 times that of its ancestor.

[0012] The mutagen may comprises ethyl methanesulfonate (EMS).

[0013] The B. thuringiensis strain may be for use as a pesticide. Preferably the B. thuringiensis strain has an increased virulence towards pests relative to its ancestor.

[0014] The strains of the present invention have been found to advantageously have increased killing power against target pests, including those pests having at least some degree of pesticide resistance.

[0015] The B. thuringiensis strain may be used in the control of pests including insects, mites, nematodes and gastropods. The B. thuringiensis strain may be used in the control of one or more of the following: Lepidoptera, Diptera, Coleoptera and nematodes.

[0016] Preferably the B. thuringiensis strain may be used in the control of one or more of the following: aphids, other Hemipteran pests, thrips, Lepidopteran larvae, Dipteran larvae, Coleopteran larvae, spider mites, locusts, crickets, ants, cockroaches, flies, wasps, termites woodworm, wood ants, bookworms, silverfish, carpet beetles, clothes moths, gypsy moths, chiggers, Sarcoptes scabiei, ticks, mites, lice, fleas, bed bugs, mosquitoes, tsetse flies, kissing bugs, root-knot nematode, soybean cyst nematode, potato cyst nematode, slugs and snails.

[0017] The B. thuringiensis strain may be used in the control of insects. Preferably the B. thuringiensis strain is used in the control of lepidopterans. The B. thuringiensis strain may be used in the control of diamondback moth Plutella xylostella and its larvae.

[0018] The B. thuringiensis strain may be used to control pests of plants including crops. Preferably the B. thuringiensis strain may be used to control pests of Brassicaceae plants. Specifically the B. thuringiensis strain may be used to control pests of cruciferous plants. The B. thuringiensis strain may be used to control pests of horseradish, land cress, Ethiopian mustard, kale, collard greens, Chinese broccoli, cabbage, Savoy cabbage, Brussels sprouts, kohlrabi, broccoli, broccoflower, broccoli romanesco, cauliflower, wild broccoli, bok choy, komatsuna, mizuna, rapini, choy sum, Chinese cabbage, turnip root, rutabaga (swede), Siberian kale, canola/rapeseed, wrapped heart mustard cabbage, mustard seeds, white mustard seeds, black mustard seeds, tatsoi, wild arugula, arugula, field pepperweed, maca, garden cress, watercress, radish, daikon and wasabi.

[0019] The B. thuringiensis strain may be applied to, near to, or in the soil of plants. The B. thuringiensis strain may be applied to the leaves, stems, flowers and/or roots of plants.

[0020] The B. thuringiensis strain has similar levels of potency to Cry susceptible insects as its ancestors. Effective rates of application against Cry susceptible insects may therefore be in the range of 0.01-0.1 mg of the B. thuringiensis strain per cm² of crop surface area or 10,000 to 100,000 of the B. thuringiensis strain spores per cm² of crop surface area. Effective rates of application against Cry1A resistant insects will depend on the precise levels of resistance and efficacy of the B. thuringiensis strain against that genotype but may be in the range of 0.01-0.5 mg of the B. thuringiensis strain per cm² of crop surface area or 10,000 to 500,000 of the B. thuringiensis strain spores per cm² of crop surface area.

[0021] Preferably, the Bacillus thuringiensis strain may comprises Bacillus thuringiensis entomocidus, Bacillus thuringiensis aizawai or Bacillus thuringiensis kurstaki.

[0022] In accordance with a further aspect of the present invention, there is provided a Bacillus thuringiensis strain comprising SEQ ID No. 2 or SEQ ID No. 3 or SEQ ID No. 4 or related sequence having 95% or more homology thereof.

[0023] The Bacillus thuringiensis strain may be a Bacillus thuringiensis kurstaki strain.

[0024] If the Bacillus thuringiensis strain comprises a related sequence, it is preferred that the related sequence has up to 96% or more homology to SEQ ID No. 2 and/or SEQ ID No. 3 and/or SEQ ID No. 4. More preferably, the related sequence has 97% or more homology to SEQ ID No. 2 and/or SEQ ID No. 3 and/or SEQ ID No. 4. Even more preferably, the related sequence has 98% or more homology to SEQ ID No. 2 and/or SEQ ID No. 3 and/or SEQ ID No. 4. Most preferably, the related sequence has 99% or more homology to SEQ ID No. 2 and/or SEQ ID No. 3 and/or SEQ ID No. 4.

[0025] It will be apparent to the skilled addressee that any features, integers, characteristics or compounds, described in conjunction with the certain aspect of the present invention, may be equally applicable to the other aspects of the present invention unless incompatible.

[0026] In accordance with a further aspect of the present invention, there is provided a composition comprising a Bacillus thuringiensis strain comprising Bacillus thuringiensis kurstaki NCTC 17080301 or Bacillus thuringiensis kurstaki NCTC 17080302 or mutant or derivative strain thereof.

[0027] In accordance with a further related aspect of the present invention, there is provided a composition comprising a Bacillus thuringiensis strain comprising SEQ ID No. 2 or SEQ ID No. 3 or SEQ ID No. 4 or related sequence having 95% or more homology thereof.

[0028] The B. thuringiensis strain may be added to the composition in the form of spores or crystals.

[0029] The composition may be in the form of a solid or a liquid.

[0030] The composition may further comprise one or more of the following ingredients: wetting agents, thickeners, viscosity modifying agents, stabilisers and surfactants. The composition may comprise a dispersing medium such as water or edible oils.

[0031] The composition may be used or for use as a pesticide.

[0032] The composition may be applied to (or near to) plants and/or the soil surface. Alternatively the composition may be incorporated into the soil itself. The composition may be applied to plants and/or soil by spraying, spreading or sprinkling. The composition may be applied to the leaves, stems, flowers and/or roots of plants.

[0033] In a further aspect of the present invention, there is provided a method for improving virulence of microbial pesticides comprising
[0034] (a) splitting a population of pests into subpopulations
[0035] (b) exposing the subpopulations of pests to one or more microbial pesticides;
[0036] (c) selecting pest cadavers from the subpopulations with highest mortality
[0037] (d) inoculating sporulation media with the pest cadavers so as to provide sufficient readily quantifiable inoculum for a subsequent round of infection;
[0038] (e) purifying and quantifying microbial spores from the selected cadavers so as to identify a microbial pesticide having improved virulence; and
   [0039] wherein the microbial pesticide is exposed to a mutagen

[0040] The method may further comprise using microbial spores from step (e) to infect one or more second pest populations.

[0041] Steps (a) to (e) may be repeated by using the purified microbial spores from step (e) to infect one or more pest populations. Steps (a) to (e) may be defined as a passage and the resulting microbes as passaged microbes. Optionally, or preferably, the microbial pesticide is repeatedly exposed to the mutagen at each passage. Alternatively, the microbial pesticide may be exposed to the mutagen at alternate passages or only during the initial passages. The purified spores from step (e) may be used to infect at least 2 pest populations. Preferably steps (a) to (e) are repeated at least once. Steps (a) to (e) may be repeated at least 5 times.

[0042] Cadavers may be selected during step (c) on the basis of total mortality of the pest population reaching in the range of 20-40%. Preferably the cadavers are selected during step (c) on the basis of total mortality of the pest population reaching in the range of 25-30%.

[0043] The above method provides group level competition on mortality rates in an insect meta-population which advantageously means that pathogens are only selected from groups with high levels of mortality for further passages.

[0044] The one or more pest populations may comprise genetically variable populations. This allows for the pathogens to adapt to a hard to kill host. The pest populations may comprise different levels of resistance to the microbial pesticides or one or more toxic compounds produced by the microbial pesticides. The pest populations may comprises an intermediate level of resistance to the microbial pesticides or one or more toxic compounds produced by the microbial pesticides.

[0045] The method may be for use in providing a library of microbial pesticides. In certain embodiments of the present invention, there is provided a library of microbial pesticides produced by the above described method. The library may be formed of a plurality of microbial pesticides having increased virulence when compared to the virulence of the wild-type microbial pesticides.

[0046] The mutagen may comprise ethyl methanesulfonate (EMS). In the method, the microbial pesticides may be incubated with 0.05 to 1.0% EMS. The microbial pesticides may be incubated with 0.1 to 0.5% EMS, with 0.1 to 0.4% EMS, with 0.1 to 0.3% EMS, with 0.1 to 0.2% EMS. Most preferably, the microbial pesticides are incubated with about 0.2% EMS.

[0047] The mutagen is preferably incubated with the selected pest cadavers prior to sporulation media inoculation. Also preferably, the mutagen is substantially removed prior to sporulation media inoculation. Removal may be by a number of means, such as centrifugation.

[0048] The purified microbial spores from step (e) may be used as a pesticide.

[0049] The microbe may be an insecticide. The microbe may be an insecticide with established pathogenicity. The microbial pesticide may comprise a bacterium. Preferably the bacterium comprises B. thuringiensis. The B. thuringiensis strain may be Bacillus thuringiensis entomocidus, B. thuringiensis kurstaki or B. thuringiensis aizawai. Preferably the B. thuringiensis strain comprises B. thuringiensis kurstaki, B. thuringiensis aizawai B. thuringiensis tenebrionis, B. thuringiensis israelensis or any other insect or nematode pathogenic B. thuringiensis strain.

[0050] The pests may be insects, mites, nematodes or gastropods. Preferably the pests are aphids, other Hemipteran pests, thrips, Lepidopteran larvae, Dipteran larvae, Coleopteran larvae, spider mites, locusts, crickets, ants, cockroaches, flies, wasps, termites woodworm, wood ants, bookworms, silverfish, carpet beetles, clothes moths, gypsy moths, chiggers, Sarcoptes scabiei, ticks, mites, lice, fleas, bed bugs, mosquitoes, tsetse flies, kissing bugs, root-knot nematode, soybean cyst nematode, potato cyst nematode, slugs and snails.

[0051] Preferably the pests are lepidopterans. The pests may be diamondback moths Plutella xylostella and its larvae.

[0052] The microbe may be mutated. The microbe may be mutated by chemical mutagenesis. Preferably the microbe is a bacterum mutated by inactivation of the mutS gene. Advantageously hyper-mutable strains or ‘mutators’ are associated with a high proportion of new beneficial mutations and an increased mutation rate may confer increased rates of adaptation to resistant hosts. Mutators also have higher recombination rates which can facilitate large scale genetic change.

[0053] In a further aspect of the present invention, there is provided a method for screening for improved virulence in microbes comprising:

[0054] (a) growing purified microbial pesticide spores;

[0055] (b) infecting a pest population; and

[0056] (c) recording number of pest deaths.

[0057] The pest population may be infected with at least 1 dose of microbial pesticide spores. Preferably the pest population is infected with at least 3 doses of microbial pesticide spores. There may be 10¹-1.2×10⁵ spores μl⁻¹.

[0058] In a further aspect of the invention, there is provided a microbial and/or biopesticide produced or identified by using the processes above.

### DETAILED DESCRIPTION OF THE INVENTION

[0059] Embodiments of the present invention will now be described, by way of example only, in which:

[0060] FIG. 1 is a schematic diagram showing the steps involved in infecting insect populations with bacterial spores according to group selection and pool selection methods;

[0061] FIG. 2 is a bar chart showing early larval mortality of Cry1Ac resistant larvae of P. xylostella exposed to ancestral (wt anc), unevolved B. thuringiensis kurstaki and evolved treatments. Data are means and SEs pooled over 2 replicate bioassays, at three doses for four replicated lineages per treatment;

[0062] FIG. 3 is a group of 6 graphs showing the overall mortality of Cry1Ac resistant larvae of P. xylostella exposed to ancestral (wt anc) unevolved B. thuringiensis kurstaki and evolved treatments. Data are proportional mortality per dose (n=50-60 larvae) with different symbols for replicate lineages within treatments. Lines are fitted statistical models (back-transformed into probability) fitted for each lineage and each bioassay. Line types indicate (dashed or solid) independent bioassays. Doses are viable spores per microlitre;

[0063] FIG. 4 is two graphs showing the efficacy of the best performing wild type clone (p3c2) against B. thuringiensis kurstaki resistant and susceptible P. xylostella in comparison to its ancestor and an alternative commercial Bt isolate (XenTari) used to target resistant larvae. Data are raw 5 day mortality from bioassays (n=60 larvae per dose);

[0064] FIG. 5 is two graphs showing the relative fitness of selected evolved clones, p3c1 (Bacillus thuringiensis kurstaki NCTC 17080301)) and p3c2 (Bacillus thuringiensis kurstaki NCTC 17080302), with increased virulence relative to ancestor across a range of initial frequencies. Data are based on the ratio of estimated Malthusian parameter; dashed line indicates fitted linear models with SE in grey. N=40-50 larvae per treatment;

[0065] FIG. 6 is two graphs showing the data of the Cry1Ac-resistant and -susceptible lavae;

[0066] FIG. 7 is a graph showing the alternating background clone bioassay in Cry1Ac-susceptible larvae;

[0067] FIG. 8 is three graphs showing the bioassay of resistant and co-evolved passage treatments for co-evolved larvae, Cry1Ac-resistant larvae and Cry1Ac-susceptible larvae; and

[0068] FIG. 9 is a graph showing the results of a bioassay assessing the toxin class for the initial mix, HCO and HCO+EMS in the toxin library selection experiment.

### EXAMPLE

[0069] The first experiment sought to increase virulence of B. thuringiensis kurstaki to an insect host genotype of diamondback moth (DBM) Plutella xylostella, which was highly resistant (LC50≈10⁵ spores) to infection. The supply of mutations was manipulated by evolving wild type and mutator (mut) bacteria. In addition, group level selection was imposed in two ways: the first treatment used pooling of larvae from sub-populations at each round of infection, a regime that should select on high bacterial population size within insects and a protocol that has produced modest increases in virulence previously (11). The second selection treatment imposed group-level competition on mortality rates in a meta-population: in each round of selection pathogens were only propagated from groups with high levels of mortality. In the second selection experiment a Bt biopestidal isolate (B. thuringiensis entomocidus i) was evolved with already quite effective virulence in P. xylostella (LC50≈10² spores); in this experiment we used a mutagen (EMS) to supply additional mutations in lieu of a mutator strain, and varied the insect genetic background used to impose selectin on virulence, in order to either improve evolution of virulence or produce mutants capable of infecting more than one genotype with higher efficacy.

### Strains Used and Construction

[0070] The wild type B. thuringiensis kurstaki strain was obtained by transforming 7.1.o strain with pHT315-gfp plasmid containing the ermB gene conferring erythromycin resistance (21). It was maintained in vitro with 10 ug/mL erythromycin. When grown from insect cadavers, 300 μg/mL erythromycin was used to inhibit growth of Gram-negative bacteria. The mut (mutator) strain was obtained by inactivating the mutS gene in 7.1.o. A fragment of mutS coding sequence containing an insertion of the cat gene was synthesised and cloned within BamHI sites of the thermosensitive vector pRN1501 (29). The resulting plasmid was transformed into 7.1.o strain, and clones with recombination of the interrupted mutS sequence into the chromosome were obtained after growth at 42° C. by screening for chloramphenicol (Cm) resistance and loss of erythromycin resistance (29). Insertion was confirmed by PCR and sequencing of mutS locus. The mutator phenotype of the resulting mut strain was confirmed with fluctuation tests showing an increase in mutation rate of 40-fold compared to the wt strain. The mut strain was grown in the presence of 5 ug/mL Cm. The strain of B. thuringiensis entomocidus in passage experiment 2 was recovered from a commercial the Bacillus Genetic Stock Centre (BGSC 414) and transformed with pHT315-gfp plasmid containing the ermB, as above.

### Passage Experiment 1; Scale of Competition and Mutation Supply

[0071] Diamondback moth larvae used for selection were reared on an autoclaved artificial diet (30) without supplementary antibiotics until 3^{rd} instar. Bt strains used for the selection experiment were first grown from single colonies into 100 mL of sporulating media (HCO) with appropriate antibiotic, then pasteurised (65° C., 20 min). Selection was then performed with 4 replicate lineages per treatment. The Cry1Ac resistant line of Plutella xylostella used for experiments was derived from a cross of NOQA-GE (from David Heckel, Max Planck, Jena) with the diet adapted susceptible line Vero Beach (from Oxitec UK), this line was selected for resistance to Cry1Ac and denoted “VL-FR”. A population that was fixed for resistance using a PCR screen of resistance alleles in the parental population (31) was established. An insect strain with similar genetic background (derived from NOQA-GE X Vero Beach) was established from F2 offspring but in this case fixed for susceptibility to Cry1Ac, this line was denoted VL-SS′.

[0072] For infection, sterile diet was cut into quarters in 55 mL dishes, and each quarter was inoculated with 90 uL of spore suspension containing 5×10⁴ to 10⁵ spores/μL (chosen to produce 25-30% mortality over 2-4 days for resistant diamondback moth) and dried. 10 third instar larvae were then added per 55 mL dish. Insect death was recorded from two days after infection. When total mortality reached 25-30%, the earliest cadavers were transferred to micro-centrifuge tubes with sterile toothpicks. After two days at room temperature (20-22° C.), 0.85% NaCl solution (saline) was added to the tubes. Cadavers were homogenised with pellet pestles, then the tubes were briefly vortexed and the suspension was transferred to wells containing 1 mL of sporulation medium in 24-well growth plates, for spore amplification in vitro. Sporulation medium was HCO (32) containing polymyxin (100 IU/mL) (Oxoid) and an additional relevant antibiotic: erythromycin 300 μg/mL for wt lineages containing pHT315:gfp or chloramphenicol 5 μg/mL for mut lineages containing the chromosomal cat marker. Rows of inoculated wells from the same line of selection were alternated with empty rows to prevent and control for contamination between lines. The plates were then sealed with tape to limit evaporation, and placed at 30° C. with 150 rpm agitation for three days.

[0073] Selection of cadavers and inoculation into sporulation medium depended on experimental treatment (as shown in FIG. 1). This experiment compared the efficacy of selecting for virulence by imposing group level competition on mortality between subpopulations in an insect host meta-population (group selection) or by imposing selection on efficient replication of pathogens in pools of cadavers (pool selection). For the group selection treatment, each lineage was split into 12 populations maintained separately. The 6 populations with highest larval mortality were selected; 6 other populations were discarded. If the same mortality was observed for several populations, the ones with earliest observed deaths were selected. Cadavers from selected populations were transferred into separate tubes (6 total). 50 μL saline was added in each tube, and the suspension from each tube was inoculated into separate wells. After spore purification (described below), spores from each well were used to inoculate 2 populations in the next selection round. For the pooled selection treatment, each lineage was split into 6 populations, which were pooled together at each round of selection. All cadavers from 6 populations in the pooled treatment were transferred to the same microfuge tube. 300 μL saline was then added and the suspension was distributed into 6 wells for inoculation. To maintain comparable population sizes, at inoculation, across treatments, only a subset of cadavers was selected from replicate lineages that had more than 30% death at time of selection.

[0074] After 3 days of growth, 200 μL spore aliquots were transferred to 96-well PCR plates with aluminium sealing film for quantification, infection in next passage and storage. Plates were centrifuged at 3000 g for 15 min, the supernatant was removed and spores were resuspended in 100 μL 0.85% NaCl. Plates containing spores to be used in next infection step were pasteurised (20 min, 65° C.) and kept at 10° C. until use, the others were stored at −20° C. Spore density was estimated by diluting 10 μL of spores into 90 μL saline and measuring OD600 nm in a 96-well microplate reader. A subset of the samples was plated at appropriate dilutions on LBA plates, in order to visually check for contamination and calibrate OD600 nm measurements.

### Phenotypic and Genotypic Characterization of Strains

### Bioassays

[0075] After five rounds of selection, the evolved lineages were frozen at −80° C. (LB 20% glycerol) without pasteurisation. These frozen stocks were used to inoculate sporulation medium for assays on whole populations. Clones were isolated from population samples by streaking 3 times (successively single colonies on LB agar plates supplemented with 20 μg/mL erythromycin (wt clones) or 5 μg/mL chloramphenicol (mut clones).

[0076] For bioassays, mixed populations or clones were inoculated into 1 mL HCO (without antibiotics) and grown for 3 days at 30° C., with 150 rpm agitation. Spore concentration was measured by plating on LBA after pasteurisation.

[0077] Lineage-level assays were carried out twice with independent spore stocks. Each assay was performed with at least three doses with 50-60 insects per dose. Initial screens of clone level variation examined 6 clones per lineage; these used 15-30 insects per dose at two doses. Data shown are deaths after 5 days. In passage experiment 1 clonal screens were analysed in terms of viable spores (counted as colony forming units on LBA) but also in terms of dilution factor of inocula relative to purified spore stocks as some clones displayed variable germination rates on LBA. Clones of interest were further characterized in additional bioassays, with methods that followed lineage assays, these assays were repeated at least twice.

### Genotypic and Phenotypic Characterization

[0078] Ten evolved clones from both the wild type and mutator backgrounds, in addition to their respective ancestors were selected for whole genome sequencing on an Illumina HiSeq 2500 at a minimum of 30× coverage by 150 bp paired end sequencing in a single multiplexed run. DNA was extracted using Qiagen genomic extraction kits, after appropriate lysis for Gram-positive bacteria. Genomes were assembled using Velvet (33) and mapped against draft assemblies of ancestors and the completed assembly of B. thuringiensis kurstaki HD-1 using PAGIT (34). Measurements of relative fitness within insects used a marked strain of the 7.1.o wild type ancestor transformed with a pHT315-rfp plasmid containing the tetR gene conferring tetracycline resistance (21). This marked ancestor therefore has a plasmid with a similar backbone to the evolved wild type strains but is distinguishable on the basis of its distinct antibiotic resistance. Relative fitness is calculated from an estimate of relative reproductive rates of two genotypes within each insect, as described previously (21).

### Results—Passage Experiment 1

[0079] After five rounds of selection clear differences in virulence between selection treatments (pooled and group) and between the two genetic backgrounds (wild type and mut) relative to the ancestral wild type were seen. FIG. 2 shows the change in early larval mortality of Cry1Ac resistant larvae of P. xylostella exposed to ancestral (wt anc) unevolved B. thuringiensis kurstaki and evolved treatments. For early mortality, both group level selection (F_{1,44}=6.54, P=0.014) and the mutator background increased the effectiveness of evolved Bt lines in killing resistant insects (F_{1,45}=4.10, P=0.049) (see FIG. 2). The data from overall (day 5) mortality broadly confirms these simple conclusions. Mutators clearly performed better than wild type evolved strains—doses as low as 25,000 spores were regularly producing mortality in excess of 75%, while 150,000 spores of the ancestor could not reliably produce this level of mortality. Group selection was also more effective than pooled selection, although the gains for wild type lineages were weaker than for mutators (as shown in FIG. 3). The full analysis of overall mortality was more complex as the effects of genetic background and selection treatment interacted with bioassay dose. However, pooling cadavers as a selection treatment was clearly inferior to group selection (generalized linear mixed model (glmm), z=−2.37, P=0.0178) while the mutators were more efficient at killing insects because mortality responded more rapidly with dose (glmm, z=−10.67, P<0.0001) (see FIG. 3). FIG. 3 shows the change overall of Cry1Ac resistant larvae of P. xylostella exposed to ancestral (wt anc), unevolved B. thuringiensis kurstaki and evolved treatments.

[0080] However, it is important to note that assays conducted with evolved lineages are potentially diverse bacterial assemblages and that lineages with increased virulence may contain clonal variants with substantially higher gains in killing power toward previously resistant insects. To investigate this clonal level variation 6 clones for each evolved lineage from passage 5 were streaked out and characterized as well as 6 clones from a subpopulation of a wild type group selected lineage that showed enhanced virulence at passage 3. The analysis of passage 5 clones broadly confirmed the lineage level assays, in that mutator and group selection treatments identified more clones with putative increases in virulence (as shown in Table 1 below). This analysis also showed that evolved lineages (especially in the pooled treatment) contain a substantial number of clones that appeared to have reduced virulence relative to ancestors (as shown in Table 1).

TABLE 1
(Clone level endpoint assays from passage 5. Six clones per
independent lineage (48 overall) were screened for increases
or decreases in virulence relative to their ancestor in two-
dose discriminating assays. These data indicate the number
of evolved clones with significant (P < 0.05) changes
in virulence in logistic regression models with binomial errors.)

| | Clones with | Clones with |
|---|---|---|
| | increased | decreased |
| Treatment | virulence | virulence |
| mut Group | 14 | 5 |
| mut Pool | 8 | 6 |
| wild type Group | 9 | 9 |
| wild type Pool | 3 | 15 |

[0081] Sequencing of a number of these low virulence clones confirms that they are Cry toxin “cheaters”, strains which have lost one or both of the large bacterial plasmid on which the majority of Cry toxin genes are encoded (as shown in Table 2 below).

TABLE 2
(Genetic characterization of evolved clones (by short-read
whole genome sequencings) revealed different patterns of
loss for the B. t. kurstaki Cry toxin bearing plasmids. 24
clones from each treatment group were screened with PCR.)

| | loss of both Cry | |
|---|---|---|
| | plasmids (pKur2/ | loss of Cry |
| | pBMB299 and (pKur6/ | megaplasmid |
| Treatment | pBMB65) | (pKur2) only |
| mut Group | 0 | 0 |
| mut Pool | 1 | 5 |
| wildtype Group | 1 | 3 |
| wildtype Pool | 7 | 8 |

[0082] In addition to this broad characterization of a large number of clones, a subset of clones of interest was characterized in more detail in Table 3 below. Notably, several mutants were identified with increases in killing power (i.e. a reduction in LC50) of greater than an order of magnitude. For some mutators (mgd6), and indeed for the lineage data in FIG. 4, there was substantial variation in virulence between assays, which is likely to be related to instability of mutator genotypes. FIG. 5 shows the efficacy of best performing wild type clone (p3c2) against B. thuringiensis kurstaki resistant and susceptible P. xylostella in comparison to its ancestor and an alternative commercial Bt isolate (XenTari) used to target resistant larvae. Data are raw 5 day mortality from bioassays (n=60 larvae per dose). Detailed assays of the best performing clone, p3c2, showed that it suffered some reduction in virulence against the Bt susceptible line VL-SS. However, it performed as well, or better, than the currently available Bt strain (XenTari) used to target Cry1Ac resistant diamondback moth (see FIG. 4).

TABLE 3
Detailed clone level variation in virulence (LC50s) -
measured as log₁₀ transformed spore dose/colony forming units
μl⁻¹ for a selection of high performing clones
with increased virulence relative to their ancestor.

| | | | | Increase in |
|---|---|---|---|---|
| | | | | virulence |
| | Genetic | | | relative to |
| Clone | background | LC50 (SE) | | ancestor |
| ancestral B. t. | wild-type | 4.98 | (0.056) | — |
| kurstaki 7.1.o | | | | |
| p3c1 | wild-type | 3.93 | (0.02) | 11 |
| p3c2 | wild-type | 2.67 | (0.024) | 203 |
| p3c3 | wild-type | 4.19 | (0.026) | 6.1 |
| mga3 | mutator | 3.73 | (0.055) | 17.8 |
| mgab2 | mutator | 4.32 | (0.04) | 4.6 |
| mgd6 | mutator | 3.6 | (0.58) | 24.0 |
| mgc5 | mutator | 4.4 | (0.11) | 3.8 |

[0083] In addition to sequencing the relative fitness of two of the high virulence clones was investigated with respect to their evolved ancestor (p3c1 and p3c2 (Bacillus thuringiensis kurstaki NCTC (provisional accession number) 17080301 and Bacillus thuringiensis kurstaki NCTC (provisional accession number) 17080302 respectively)). Since group selection has the potential to increase the frequency of traits that are costly to individuals it was expected that the protocols may have allowed identification of clones that are more effective at killing hosts than their ancestors but which have reduced competitive fitness in insects, potentially because they have evolved greater levels of investment in production of virulence factors. As predicted, clone p3c2 was substantially less fit in terms of competitive fitness with respect to its ancestor (t=−4.2, P<0.0001); while both clones showed fitness that declined as their initial frequencies increased (t=−2.3, P=0.022) (see FIG. 5), a pattern consistent with social interactions and the costs of producing secreted virulence factors in B. thuringiensis (21, 28). FIG. 5 shows the relative fitness of selected evolved clones with increased virulence relative to ancestor across a range of initial frequencies. Data are based on the ratio of estimated Malthusian parameters.

### Passage Experiment 2

[0084] The second passage experiment had several additional aims. First, to repeat the group selection experimental protocol with a different bacterial genotype (here B. thuringiensis entomocidus) and second to test whether the virulence could be improved of a pathogen against a relatively susceptible host. We chose B. thuringiensis entomocidus (Bacillus Genetic Stock Centre strain 414) as a target, as it is as effective against Cry 1Ac diamondback moth larvae (LC50≈490 cfu/μ1) (FIG. 6) although not as pathogenic as B. thuringiensis kurstaki. Resistance to Cry1Ac also provides some cross-resistance to this B. thuringiensis entomocidus strain (conferring an of LC50 7900 cfu/μ1). Here we also set out to test whether a mutagenic agent (0.02% ethyl methanesulfonate (EMS)) could be used in lieu of mutator strains in selection to provide addition genetic variation for selection to act upon (see below). Finally, we had two specific evolutionary hypotheses to evaluate: we tested whether diversification of the host genotypes in selection lines could be used to generally improve virulence against multiple insect genotypes; this was tested by alternately passaging Bt lineages in Cry1Ac susceptible and resistant populations. Finally, an additional treatment tested whether increased responsiveness to selection could be gained by co-evolving both insect hosts and bacterial pathogen, as opposed to evolving pathogens against a host with a constant genetic background.

[0085] There were therefore four treatments in this selection experiment, all of which used a chemical mutagen:
[0086] 1. Selection in Cry1Ac-susceptible larvae;
[0087] 2. Selection in Cry1Ac resistant larvae;
[0088] 3. Alternating selection in susceptible and resistant larvae;
[0089] 4. Coevolution treatment, here larval populations that were heterogeneous for the Cry1Ac-resistance allele (at 10% initial frequency) were used to initiate passage. In each independent replicate, larvae that survived an infection from Bt under selection (ca. 400 per replicate) were reared on to adult stages to provide larvae for the next passage.

[0090] The overall structure of this selection experiment followed the group selection design in experiment 1 (FIG. 1). For each passage round there were 4 treatments, each of 4 replicates of 10 subpopulations. Once mortality had reached >20%, cadavers from the 5 subpopulations with the highest/earliest mortality were kept and spores recovered from them for the next passage round. Spore inocula were adjusted between rounds to try and maintain ˜20% mortality.

### Mutagenic Protocol

[0091] The protocol differed from previous ones as during an in-media growth phase a chemical mutagen was added, with the aim of increasing variation for selection. In practice, selected cadavers were mashed and incubated in 100 μl of LB at 30° C. for 3 hrs, then 0.2% ethyl methanesulfonate (EMS) added and incubated for a further 3 hrs. The EMS mutagen was then removed via centrifuging and resuspension, and spores the produced by adding the resuspension to 1 ml HCO per subpopulation (with selective erythromycin) and incubating at 30° C. for 6 days. Preliminary work with EMS identified a concentration that produced the greatest number of rifampicin resistant mutants without significant cell death, and the chosen 0.2% concentration was then used as described above.

[0092] After the final (5^{th}) round of selection, spores from each selected subpopulation in each replicate were bio-assayed against resistant and susceptible larvae (and the subsequent generation of co-evolved larvae for the resistant and co-evolution treatments) at a range of spore dilutions. Spore dilutions were varied depending on treatment and larvae in the bioassay to cover from 0% to 100% mortality, and dilutions were refined in a 2^{nd} round of bioassays to better achieve this. The ancestral Bt entomocidus strain was also included in all assays for comparison. Spores were grown in HCO for all endpoint bioassays.

### Results—Passage Experiment 2.

[0093] Here we investigated whether our use of a mutagen could also produce significant increases in virulence; whether specialized adaptation to one Cry1Ac resistant insect genotype could be offset by selecting pathogens in alternating insect genotypes and finally whether co-evolving insects and pathogens could accelerate the evolution of resistance.

[0094] B thuringiensis entomocidus in the susceptible larvae and alternating treatment evolved significantly increased virulence to both Cry1Ac-resistant and susceptible hosts (mixed model binomial errors, χ²=6.67, df=2, P=0.036) (FIG. 6). However, gains in virulence tended to be relatively modest and resulted only in the halving of LC50s; with the exception of replicate 3 in the alternating treatment (shaded triangles in FIG. 6), this a had 10-fold reduction in LC50 in susceptible insects (LC50=53.7 cfu/μl) (FIG. 6). Multiple individual clones from this lineage shared similar increases in virulence in Cry1Ac susceptible larvae relative to their ancestor (FIG. 7). While this demonstrated that use of a chemical mutagenic could facilitate improvement of virulence, the alternating exposure to different genetic background did not lead to avoidance of trade-offs: gains in virulence in targeting Cry1Ac susceptible larvae were accompanied by reduction in virulence against Cry1Ac resistant larvae (FIG. 6; LC50 of replicate 3 in resistant insects 26,900 cfu/μl). Note that other evolved lines showed a consistent halving of LC50s for both resistant and susceptible larvae.

[0095] B thuringiensis entomocidus was also selected to increase virulence against a constant Cry1Ac resistant insect genetic background, and in a co-evolving insect background, which increased resistance as selection for virulence proceeded. Both these selection treatments produced bacteria that were significantly more virulent than their ancestor (FIG. 8: resistant larvae treatment—estimate=1.36, SE=0.40, t=3.44, P=0.00787; co-evolved larvae treatment—estimate=1.23, SE=0.41, t=2.99, P=0.0034). However, both these selection regimes produced similar gains in virulence (FIG. 8) so there was no additional benefit to be gained from co-evolving larvae with pathogen in this experiment. Notably at the end of the experiment the co-evolved larvae had similar levels of resistance to B. thuringiensis entomocidus as the Cry1Ac resistant larvae (estimate 0.3, SE=0.26, t=1.18, P=0.24). In selection treatments with resistant and co-evolving larvae, improvements in killing these genetic backgrounds did not appear to result in a trade-off; evolved lineages did not acquire reduced virulence in Cry1Ac-susceptible larvae (FIG. 8).

### Toxin Library Selection Experiment.

[0096] Here we set out to test whether group selection could isolate mutants with high virulence from a library of clones with pre-existing variation in the Bt toxin Cry1Ac. Selection was started with a mix of 16 clones from a library of toxin variants; each variant contained one to seven amino-acid changes in Cry1Ac. Each variant was present on a pHT315 plasmid containing the ermB gene conferring erythromycin resistance, transformed in Bt 407 Cry-background. Plasmids were maintained in vitro with 10 ug/mL erythromycin. When grown from insect cadavers, 300 μg/mL erythromycin was used to inhibit growth of Gram-negative bacteria.

[0097] The passage experiment was performed according to the group selection regime as described in Passage experiment 1 (FIG. 1), using the insect strain VL-SS susceptible to Cry1Ac and an infective dose of around 30 spores/μL (chosen to produce 25-30% mortality over 2-4 days for susceptible diamondback moth). In this experiment we applied two treatments, one in which spores were produced in HCO media, as per passage experiment 1, while the second treatment used additional chemical mutagenesis as per the protocol set out in passage experiment 2 (HCO+EMS). We carried out three rounds of selection. After selection 12 clones from each selection replicate were isolated from cadavers and Cry variants were identified using PCR and Sanger sequencing (48 clones per treatment in all).

### Results—Toxin Library Selection Experiment

[0098] Initial bioassays indicated that 6 mutants had virulence that was indistinguishable from negative controls, i.e. these genotypes were null mutants that had no Cry1Ac activity (N135Q; EP8; EP26; EP23; EP14; EP15). In addition 3 mutants had suffered some moderation in virulence as a result of amino acid changes: EP13 (LC50 52 spores/μl); EP27 (32.7 spores/μl) and EP24 (23 spores/μl); these mutants are classified as having very low, low and moderate virulence respectively (see shading in FIG. 9). All other mutants had amino acid changes that did not appear to affect mortality—these were classed as having “high” virulence and shared an LC50 of 12 spores/μl. Three rounds of group selection decreased the representation of Cry1Ac null mutants in both selection treatments. However, the HCO− only treatment also increasing the representation of the high virulence mutants, whereas in HCO+EMS (mutagen) treatment, mutants with low and moderate virulence increased frequencies at the expense of highly virulent mutants.

### Discussion

[0099] These experiments demonstrate a number of novel and effective steps that could be used to improve a biological pesticide based on B. thuringiensis, or other insect pathogens. First, it demonstrates that a combination of in vivo selection on mortality and in vitro bulking up of infectious material can be used to produce rapid changes in virulence phenotypes. Each round of infection and sporulation took under two weeks, and therefore an experienced researcher could conduct five rounds of selection in less than three months. These methods appear to be repeatable for different bacterial genetic backgrounds with different applications in mind. Notably experiments could consistently increase virulence in both highly and moderately resistant insects, although one replicate in the alternating selection regime in the B. thuringiensis entomocidus passage experiment did gain significantly increased virulence against susceptible insects.

[0100] Importantly, the details of the selection protocol are critical to producing good results. While previous selection experiments in both Bt and other pathogens have shown that pooling groups of bacteria and selecting for high population size and effective use of resources can maintain investment in virulence and produce strains with shorter time to death (7, 11), here it is shown that group level competition in a meta-population produced lineages with greater increases in virulence (see FIGS. 2, 3; Table 1) and was more effective at maintaining production of Cry toxins (see Table 2). The consequences of modifying selection design to including diverse genetic material in insect targets are not so clear-cut. Nevertheless, the improvement of 5/8 replicates in the alternating and co-evolution treatments in passage experiment 2 suggests that these modifications can further refine the selective process. In these experiments co-evolving target insects with pathogens did not improve response to selection for virulence. However, this could be because resistance to Cry1Ac (in the NA-QAGE derived insects) in these experiments is monogenic and largely recessive. Individuals that are heterozygous for resistance may not have the intermediate levels of resistance that can facilitate pathogen adaptation and may appear only fleetingly in selection experiments. Coevolution regimes in target hosts with more complex modes of resistance could prove more successful. Characterization of evolved clones with increased virulence has not yet revealed any changes in sequence of Cry toxins; evolved clones also vary in their level of virulence (see Table 3) and in their reproductive rate in insects (as shown in FIG. 5), suggesting that improvement has occurred via a range of mechanisms.

[0101] In addition, it has been shown that group-selection can facilitate isolation of clones with improved biocontrol potential, but which suffer some individual level cost, i.e. they have a reduced fitness in competition with their ancestor (see FIG. 5). Thus this selection regime has the power to create and identify mutants that would not rise to high frequency in conventional sequential passage experiments. Since investment in virulence factors and secondary metabolites is expected to be costly for a range of pathogens, and not just Bt, group selection based protocols could therefore have broad potential for improving virulence in range of biological control agents. Other entomopathogenic microbes, such as fungi, which also invest in a wide range of secondary metabolites used to enhance virulence might also respond to group level selection techniques. Previous research has indicated that cheating and conflict might account for the dynamics of virulence in entomopathogenic nematodes (35), another important group of biological control agents. As with Bt these organisms, and their symbionts, secreted a wide range of protein based virulence factors important for invading, killing and digesting their insect hosts (36). Moreover, selection experiments indicate that treatments that limit opportunities for cheating and within host competition are better at maintaining virulence. In addition, group-level competition based on maximizing reproductive rate in cadavers did not lead to better maintenance of virulence in that study, since there appeared to be a trade-off between virulence and maximizing the production of progeny in hosts (35).

[0102] While the methods presented here provide a framework for the general improvement of virulence against a particular insect host, the combination of in vivo and in vitro selection could also be applied to adapted strains with good virulence characteristics to cheaper or alternative growth media, while retaining pesticidal efficacy. We have shown that protocols that rely on generating genetic variation via fixed, higher mutation rates or by chemically-induced mutagenesis can facilitate selection for increased virulence. Of the two protocols, the use of a chemical mutagen has two advantages; first it does not require the use of a genetically modified strain and second any clones produced during selection are phenotypically more stable.

[0103] We have also demonstrated proof of principle for the application of these selection techniques to pools of mutants with pre-existing genetic variation, here derived from a library of clones in which proteins of interest have been mutagenized. Notably in this experiment, there was no benefit to supplementing mutation supply with a mutagen during the course of the selection experiment.

[0104] The forgoing embodiments are not intended to limit the scope of the protection afforded by the claims, but rather to describe examples of how the invention may be put into practice.

### Biological Deposits

[0105] The application refers to the following indications of deposited biological material comprising two (2) deposits:
[0106] Name: European Collection of Cell Cultures
[0107] Address: Public Health England Porton Down,
   [0108] National Collection of Type Cultures,
   [0109] PHE Culture Collections, Microbiological Services,
   [0110] Porton Down,
   [0111] Sailsbury,
   [0112] SP4 0JG
   [0113] United Kingdom
[0114] Date: 3 Aug. 2017
[0115] Accession Number: NCTC 17080301 (provisional number)
[0116] Descriptor: Bacillus thuringiensis kurstaki (p3c1)
[0117] Depositor: University of Exeter

[0118] -and-
[0119] Date: 3 Aug. 2017
[0120] Accession Number: NCTC 17080302 (provisional number)
[0121] Descriptor: Bacillus thuringiensis kurstaki (p3c2)
[0122] Depositor: University of Exeter

### REFERENCES

[0123] 1. M. Kruger, J. Van Rensburg, J. Van den Berg, Environ. Entomol. 40, 477 (2011).
[0124] 2. B. E. Tabashnik, J. B. J. Van Rensburg, Y. Carrière, J. Econ. Entomol. 102, 2011 (2009).
[0125] 3. T. Vaughn et al., Crop Science 45, 931 (2005).
[0126] 4. M. Soberon et al., Science 318, 1640 (2007).
[0127] 5. A. H. Badran et al., Nature 533, 58 (2016).
[0128] 6. S. P. Diggle, A. S. Griffin, G. S. Campbell, S. A. West, Nature 450, 411 (2007).
[0129] 7. A. S. Griffin, S. A. West, A. Buckling, Nature 430, 1024 (2004).
[0130] 8. T. F. Cooper, PloS Biol. 5, e225 (2007).
[0131] 9. R. E. Lenski, Evolution 42, 425 (1988).
[0132] 10. R. D. Schulte, C. Makus, B. Hasert, N. K. Michiels, H. Schulenburg, Proceedings of the National Academy of Sciences 107, 7359 (2010).
[0133] 11. J. Garbutt, M. B. Bonsall, D. J. Wright, B. Raymond, Ecol Letts 14, 765 (2011).
[0134] 12. M. Berling et al., Applied and Environmental Microbiology 75, 925 (2009).
[0135] 13. R. Maddamsetti, P. J. Hatcher, S. Cruveiller, arXiv.org, (2012).
[0136] 14. M. E. Watson, J. L. Burns, A. L. Smith, Microbiology—(UK) 150, 2947 (2004).
[0137] 15. C. D. Bayliss et al., Infection and Immunity 76, 5038 (2008).
[0138] 16. C. Pal, M. D. Macia, A. Oliver, I. Schachar, A. Buckling, Nature 450, 1079 (2007).
[0139] 17. D. Racey, R. F. Inglis, F. Harrison, A. Oliver, A. Buckling, Evolution 642, 515 (2009).
[0140] 18. J. A. G. M. de Visser, Microbiology (Reading, Engl) 148, 1247 (2002).
[0141] 19. A. C. Shaver et al., Genetics 162, 557 (2002).
[0142] 20. E. van Leeuwen, S. O. A. Neill, A. Matthews, B. Raymond, ISME J 9, 2328 (2015).
[0143] 21. L. Zhou, L. Slamti, C. Nielsen-Leroux, D. Lereclus, B. Raymond, Current Biology 24, 2417 (2014).
[0144] 22. F. Ginetti, M. Perego, A. M. Albertini, A. Galizzi, Microbiology 142, 2021 (1996).
[0145] 23. N. Colegrave, S. Collins, Heredity 100, 464 (2008).
[0146] 24. S. West, S. Diggle, A. Buckling, A. Gardner, A. Griffin, Annu. Rev. Ecol. Syst 38, 53 (2007).
[0147] 25. S. A. West, A. Buckling, Proc. R. Soc. Lond. Ser. B-Biol. Sci. 270, 37 (2003).
[0148] 26. J. B. Xavier, K. R. Foster, Proc. Natl. Acad. Sci. U.S.A 104, 876 (2007).
[0149] 27. G. J. Velicer, L. Kroos, R. E. Lenski, Nature 404, 598 (2000).
[0150] 28. B. Raymond, S. A. West, A. S. Griffin, M. B. Bonsall, Science 337, 85 (2012).
[0151] 29. D. Lereclus, M. Vallade, J. Chaufaux, O. Arantes, S. Rambaud, Biotechnology 10, 418 (1992).
[0152] 30. F. Hunter, N. E. Crook, P. F. Entwistle, in Viruses as pathogens for the control of insects., J. M. L. Grainger, Ed. (Academic Press, New York, 1984), pp. 323-347.
[0153] 31. S. W. Baxter et al., Genetics 189, 675 (2011).
[0154] 32. M. M. Lecadet, M. O. Blondel, J. Ribier, J Gen Microbiol 121, 203 (1980).
[0155] 33. D. Zerbino, E. Birney, Genome Research 18, 821 (2008).
[0156] 34. M. Swain et al., Nature Protocols 7, 1260 (2012).
[0157] 35. D. Shapiro-Ilan, B. Raymond, Evol Appl 9, 462 (2016).
[0158] 36. I. Eleftherianos, S. Joyce, R. H. ffrench-Constant, D. J. Clarke, S. E. Reynolds, Parasitology 137, 1695 (2010).

The application's sequence listing, which the Patent Office published only in electronic form, follows.

SEQUENCE LISTING (4 sequences)

SEQ ID NO: 1 - DNA, 6389548 bp, Bacillus thuringiensis (residues 1-2,129,850 of 6,389,548)
atatgttacgaatacgccttgggaagtggttccgatggaacaaattcatgatttttactccctccgctggcagatcgaaatcatatttaaaacgtggaaatctctatttcaaattcatcattggcaaactatcaaacaagagcgattagaatgccatgtgtatggaaaactcattgccatttttatatgttcttccacgatgtttaagatgcgccaacttctgttgcaaaagcacaaaagagaactaagcgaatataaagcaattgggatgattcaagatcatctatccctgttatatcaagcgatacagagaaacacccgtataataacaaaggttttaatccgcctgtttaccctactaaagaaaaatggccggaaatcccatcgatatgagaagaaaactatctttgatattatgggtgttgtctatgagtataatggattgagaaaacaaaagaaagctgcataagaaaaaaatgaaacccgttagggtttatttcgtatgctcatttttaagaggattatactgtttaaaagtttgttcatttcaattaatggaaaaccgtagagtttctatccttaagttgatgggcatgggttatagccccttactgtaatcttttgtcataaccgtcactattacgagaatacctctaaatgagcacttcacagcacttcgctatcattttaaatcatatctttttgaaatgcctctaacgcaatatgaacagtctcatctgaaatagatacgacattcactaccccatattcctgcataagcaccatatgaattgctcctgcatttgctttcttatcttgtttcatcaattgaacgaggcgctctacattcaaatcccttggcatttttggatagccgtatttcaagaaccactgcttcatatcttcataagcaagatcaaccttgtacacttgctcacttaaaaatatggcgaataacattccaaccgctacaccgtcaccgtgagtaatatttccataccctagctctttttcaagagcatgtcctaacgtatgtccaaagttcaaatgagcacgtacacccttctctgtttcatcttgtgacacaacatttgcctttacaggaatcgccttcgttaatatatggattaacttctcatcatgaagatccgctaatgtttgcacttcttcttttaaccaatggtatagctccacatcaccgataagagcatgctttatcacctctgcataacctgaacgccactctttttcaggaagagactgtaaaaacggtgtatgatatacaactgcttctggctgatggaatgcaccaatcatatttttacctaacggatggttaatcgctactttcccacccacagcgctatcgtgcgctaataaagttgtcggaacctgcacaaagcgaataccacgcataaacgatgcagcaacaaaaccagctaaatctccaatcattccgcctccaagtgcaagaattaaagaatttctatctaatttattttcaagagctgacgtatgagccgcatagaaattttcgaaagacttctctttttcgccacttggtacaacaaacgaaaacacgtgctgctctacttgtaatgcatcgataactgtctgtaaatgtagtgatgcaacagcttcatctgaaatgatcattacgttagataccgctggctgcatattttgaacgatcgttgttaagtttgacaacgcttctttaccaacatgtacatcatattcttttgatttcgtttgaatatgtatgtttcccattaaaatcccctcgcatattcattatgtttctcaatattttcacgaattagttccatacgatctaatccgaattgttctattaaagctgtcgctaattcccaagccacaaccgcttctgcaacgacactagctgctggcactgcacaactatctgaacgttcaatactcgctgtaaaaggctctttcgtatcaatatctacactttgaagaggtttataaagtgtaggtatcggtttcatcacaccgcgcacaacaattggcattccagtcgtcataccgccttctagtccacctgcattatttgttcttcgtgtatatccatgctcctcatcccacagaatttcatcatgaacttcacttcctggtctatgcgctgcttcaaaaccaattccaatctcgacacctttaaaagcattaatactcataattgcagctgctaatttcgcatccagttttcgatcataatgcacgtagctacctactccaattggcatcccttccacaattacttcaacaattccaccaattgaatcaccatttgctttcgcatcatcaatcgctttcatcatttggttaccagcttcttcatctaagcaacgtacaggatatgcttctgtaatactctttaattcttcaattgaactatacgtaatctccttagcttgtacaccgccaatttcaattacatggcccgccactttaataccaagttctgctaacacctttttagcaaccgcaccagcagcaacacgcaccgtcgtttcgcgcgctgacgaacgttccagtacattcctcatatctctatgaccatatttaatcgcaccatttaaatcagcatgcccaggccttggttttgtcactttccttttcatctctttttcttcttgctcagttaaaggctccgcccccataatttttgtccagtgtgcaaaatcacgattttcaacaacaagtgcaataggggaacctaatgtttctccatgtctaacaccacttaaaatttgcacttgatccgtttctatttgcatgcgtctaccgcgcccatatcccttttgccttctagctaactcttcgtttatatcatctgctactaaagacaatcctgccggaacaccttctataatcgttgtaagttgtggaccatgagattcaccagctgtaatatatcgcatacgttattcctcttttcgtatatgtatttatctcactatattaacttttatcattctaaaaatattaaagaaattatatcataaatcgaccattttcttattctatatttccgataggcctaatttaaatatcaacatatcataacagctcaaacttcgtaactaactgaaaataaaaaagtgcaagaagaatacccctattctccttgcactttttactattatcacagtgattaaagcgtttacaaattatttcaaaataattagtaaatccattcattcattaattttgagtagtcaactaattcttcttctttaaagaaaatagcaatctcgcgctctgcgctttctaaagaatcagaaccatggataatgtttttcgcaacagttacaccgaaatctccacgaattgttccaggagctgcttcatgtggtcttgttttccccatcatgttacgcgctgtatctactacaccttcaccttgccataccattgcgaacacaggtccagatgtaataaagtctactaactcaccaaagaaaggtttttccttatgctcagcgtagtgttgtccagcaatttccggagtgacttgcattaattttgcaccaactaattgaaagccttttttctcaaaacgagctacaatttccccaatgaaggcacgttgtacaccgtctggttttaccattagaaatgttttttccataaaaaatctctccacttctgaattatgtatgtaattgtatatccccacacacatattatcacccttatcacaattgtgcaatagttttgaaatagagagattattttattttttagaataaacattaaaattttcgttttccaatatactttgcaacattttgtaatgcgtactttgcttttccacgtgggagtggttttattatttctaaagctttatgtaaataacgttcactaaatgcaaatgcttgatcaattgctgtactattttttacagcatcaataatttcttgtatttcacttgctgttgaattttcatgtacagatgtgattttctgacgaagtacgggatcttccatcgcatatagagcaggaagtgtaatattcccttgtagtaaatctccgccagcaggttttccaagtttctcttctgtagaaacgaagtctaaaatgtcatcaataatttgataagacattcctacaaaatacccataccaaaatagacgatttaccgtatcacgattagcaccagcagcaatcgctcccaattgacaactcgcggcaattaataatgctgtttttcgctttattcttcttaaatacgttcttaaattttggttataattgtatttatctttaatttgttcaatttcacctttacagacttctaaaatagtatgtgataacgcttgatgcgcctctggaatttcgatatttgttatacattcaagagacttagcgaacagatagtcccctgtatacatcgcaatacgatctccccatttcgcattcacagtcgcactgccgcgtcgtaaaaatgcagcatcaataacatcatcgtgaacaagagaagccatatgaataagttctaacgcaacagcaacatgcttaatcgcatctaacttataatctccaaatttccctgcaagcaacacaaatacaggacgaattcgtttcccaccagcttcaataagctgtaatgctgcctcttctactaatggctgttcagaagcgactgtcttttttaattctttttctatcacattaatatccgatcgtaaaaaagagtacataagttgtaacttcatattgttcaccttaacctaaaacttcttttttctattttgattctggtttaatacctaaatgcatcgctgctaccccaaaagtaaatggtttcacttgcacacgttcaagtccagcttgctcaaacatttgagccaattctttcatccctgggaacgtactagcagattcttgaagccatgaatactctttataacttttcgcaaacatctttccaaataacggcatgatatatttaaagtataaaatatacccttgtcgaaaaccaatcattgttggttgagatgtttctaaacagattacttttccacctggttttactacacgcgtcatttcttttaatacgtgcatataatccggtacgttacgtaaaccaaacccaatcgtcacataatcaaacgtattatcttcaaacggaagttccattgcattcccatgtagaagttctacttgttttaattgtaacgcctctaccttttgcttaccgacagataacatattttcactgaagtctaagccaacaacctttccttgttcacctacggctccagctagcgcaattgtccaatctgcggttccacagcatacatcaagcgcttgactgcctggttgtacatccataattcgcatcgtttctttacgccacgctttatgtctttgaaaactaattacagaattcatcacatcgtatttatcagaaatcttttcaaatacgtcatgtactctttcttcttttgattgttgcatgctcgtaccttcttccaatgtaaaattgcttatgtcttctatttattccttaacacagaatttatttcatttatgtctgtgtgattttctaaaaattgtttttctttctttctcaattccttcatccaaccattaatcactacttctgctttatcccctaaagcatcttgcatagcttgaaaaacaggcgaatgttgcttatcagcatacaattgaatttctttttgaaggcgatttccacctaatacgtatgtgataaatggcttccaatgtgataactgaaaatgatcacatgttttttgaaggagcgcagactcaatcattactatgcttttcattatgtcatccgtcgtttcatgcgctttttggtataacataattttgtgttcatttatctctttaattccttcagcaagtgcacgaattaaaacaatatcacgattcatagacaataaataataatatagtccactatagtaatcgcctgcaagtactgttaattgacgacatttatggaattcaatctcttcctcgcctgctttatttgataccctttcatgcgtatcaagcgcaatttgtacaagcataattgttactacgtaatgctcaatttgttctatatgtaagtttgcactctttaaagcaccatataacaatgctatcttttcttcatcaataaatggttcttcaatatagtttataaagtaaggatggcgtaatttctccatcaatttttcttttatactcgcataccctccgtagatgtcacacacaaaaaatcacccttgttttctaattcataaaacttattataacacatacactctattttctataaccaaaacttggctacacctaccattcatgtaagcaatctttctaatctcactctgtctagttaaaactatatcatttatttactaaaaaaaaaaagaaaagcagtttcccgcttttctttacttcgttttaataaacgataaaatttcactgcgcgctgcagcatcattttcaagcacaccacgcactgctgtcgttactgttttcgcacctggtttttttacaccacgcatcgtcatacacatatgttctgcttctactactaccattacaccatgaggctctagtacttccataatagagttcgctactgttgatgtaatacgttcttgcagttgtgggcgacgtgcaattgtatctacggtacgagctaatttacttaaccctgtcacctttccaccttgcggaatatatgcaacgtgagcaactccatagaatggaactaaatgatgctcacacatcgaataaaatggtatatcttttactagtacaagctcttcgtgatcttctccgaatactttatgcaaatgctctttcggatcttcatgcatacctgagaacacttctgcgtacatttttgcaacacgctttggtgtatcaagtactccctcacgatttgggtcatccccaatcgcctctaaaataaggcgtactgcatgttcaatttgttctaaattaacttttgccatccgctagccctcccgaaaacctaaaagtgatacgaacacattctagcatatttatgtttttaaaagcaaaaagaagagttcccaaaaaggaaactcttcttccctgttaatatgtaaggattatttaaccgcatcttttaacgctttaccaggtttgaatgcaggtactttacttgcagcgatttcaatctcctcacctgtttgtgggttacgacctttacgagccgcacgctcacgaacttcgaagttaccgaatccgatcagttgtactttatcaccttgttttaaagcttctaagatagaatcaaaaacagcgtctactgcttttgttgcgtcctttttagaaagggaacttgcttctgcaacagcattgattaaatctgtcttgttcatgccattcacctcctcccaaagataagactgtataatgatcataaaatgagtcttactttcatttgtaggcaatttttgcaaattctatactacaaagatgtagataaatcattatcaacgcctatattatacgattctcctttataattcaatatttttaaggaaattgttactctgaaaatgtgaaaatctgatgaaacttgacaatttacaacaatgtattagataatgactgtttatttttctattttataatcaaaaaaacaaaaaatccctctacaatgagagggattttttcttatagtataatcgcaattaatccgccagatccttcattaataattctttctagcgtttcttttaatttatatctagcattttctggcattaaagataatttcgcctgaattccttctcgaacaatcgagctaagtgaacgtccaaatatatcagaattccaaattgataacgggtcatcttcaaaatcttgcattaaataacgaactaattcttcactttgcttttcagtaccaatgatcggctcaaacgttgactctacatctactttaatcatatgaatagatggcgctaccgcttttaacttcacaccaaaccttgaaccgtgacgaataatttctggctcatctaagctcatatccgctaatgcaggcgctgctacaccatatcctgtttgcttaaccatacgcagtgcatccgccacttgatcgtactctattttcgcatgagataaatcgagcataagctttaataaatgatctttcccccgaatttctactcctactacttcttttaaaatttgatcatacaattcatctggcgcatataaatcaatctcagccacaccttgccccatatcaatgccagctaggctcgctcgatcaataaattcatattgactaaactgccaaacaacgcgatccacatcacgaagacgttttatatccttcacagtttcttgaactgcttcttgataactttgacgcaaccaatgcccttcatttagcaccattacccagctcggaaggttcacattcacttctaatacagggaattcaaatagtgcttcacgaagtacattatatacatctgtttctcttaaactctccacactcattgcaataaccgggatatcatattcttctgataaactttggcgtaattgctctgtatctggatgatacggctgtaccgtattaattatcataatgaaaggttttcctacttctttcaactcatttacaacgcgttcttctgcctctatataatctcttcttggaatttcaccaattgttccatctgttgtaattacaacaccaattgttgaatgttcttgaattactttacgcgtgccgatttctgcagcttcatggaatggaataggttcttcataccaaggggtattaatcatgcgtgggccattctcatcttcatagcccttcgctccaggaaccgtatatccaacacaatctactaatcgaatattcacttcaagtccttcatctacttcgatagaaaccgcttggtttggaacaaacttcggttccgtcgtcataattgtacgaccagcagcactttgaggcaattcatcctgcgctctttgacggtcagactcattctcaatgtttggaataactacaagttccataaattttttaatgaatgttgatttccctgttcgaacagctcctacaactccaaaataaatatcaccgcctgttcgttctgcaatatctttaaaaatatctaccttttccaagtgattccctccctcaaaatttttgggaataattccgcgtttatagtcaactaataccttctctaacgttgcctataatatctgatataatataatggtattctagaagttcggacaatatatcatataattttgtccaatttcatatgactattaaaaaatatcttttgtttgcatcgtaagttgtataacataaaaaacctttcttctagaacttattcactaaaagaaaggttcatgacttatcattttaaaaaaattggttctccatcctttactgtgtacggtaaagaataagctggtacaaacggggaacctttcgaaagtatatttcgaatatcttctccctccgtaaactgcccttcattttttttcaaagcgtcatataagtcgattctataatcaacaaaaacttctcctttttcattaattacaaaaggaagtcctttaccagaatatggacttgtcacttgtggcacatctttatatcctagttttttgaaatctaattcatatacaccatctgaaattacttttttaaaaggtggatattgatgttcatcacgatacatcctaagctttaaagatagttcctgaatttgttcagccatcctaacatcaattaactttactgttggatttgtttcaacgtctattaatacgtattgatatactcctccactttcatacgcattccctggcgcttcttgtatgtaacgcggggcaatctgttgaaaatcgatcggatacttttgataaataggtgtactcatatccctcgtcttaattggcaatatcccatcattttgctccttaaatgtcacaacagctttttgaacaacctgtagctgatcttcataaggaaccgcattttgcttcatattttctttcggatacagacaccccgttaaaaggctcatacaacaaaatattaaaataatatgtaattttttcactagcatcaccttttcatactaatctaatttgctctgtatgtagtattttcgagaccattccatttactgctgtacaggtccactaaatacaacaagaaaaataacaattcctgacacaatcataagggtgtacgctactaatgctgtaatccctttcaaaaatttattctttattttatgtctacttaataaaataaaacttactgcaaaaaacataaatccaattgcccctaaagctaaccacattttcataagcccttctgacatatacacacccctttttatcaatctatttttatactattttaacaaattaaaatctttaaacaaatacaaaaagaacattttactacaaattgcgaatatataactttaatcaataggttttccagcatttttcaccaatctaggcaaaaataaaaccgaagcgattgtacctctcacttcggttgaccaaatatgcccaaaaacagctctattcccattctttcatggctatcatatgcaatctacaaactctttgtttctcataatttattttttaaacattttgcttaacgagccaaaatctgttggcatattattattaataatcgcttttacaatttgatcctcttgctctttcggcacttcacgtcccgccataagagccacttgatgaattaattgacgaagtacagtttcatcacgtaaattcgcattttgcacggatgatgctaatttaaaaatatcctctttatttactttcgcttccttctcaatattattaaaaatattattatccattcttttcaccctctcctcaagttactcttcatcctatgcaaaaatgaaaaaatggtgaaaagacccaaaaaataaaaaagcgacagaagtacaaatgtacttctgtcgcttttctttacagtaaatcaggtatagcttccacttcatgttttcgaacacgccccatcaatgagcctaccgcatcttttacgttattcccattgaacagcacgtcatataaagcagctgtaatcggcatttcaacttccattttctctgccaattcatgagcagctttcgttgttcttacaccttccacaaccatacccatgctttctaacacttcttctaaagagtgtccttttccaagcatatttccagcgcgccaatttcggctatgaacacttgtacacgttacaattaagtctcccataccagttagaccagcaaacgttaacggattcccgcccatttttcttcctaaacgagcaatctctgttaaaccacgtgtcatcaatgccgcctttgcattatcacctaatccaagaccatcagttataccagcagctaatgcgataatattttttaacgcaccaccaagttcaactccaacgatatctggatttgtgtatacacggaaataactattcataaataaatcttgtacttcctcagccgcttccatacgctttgctgcagacgtaactgttgtcgcttgtcgtaaaccgacttcttcagcatgactcggtccagacagtacaacaacatctttaattaagtgctctggaatttcttcctcaatcacttccgaaatacgttttgacgtaccaggttcaattcctttgctcgcatgaatccaagtaattggttcagtaacaatttctttcatctcttgtaatacatctctgtacgctttcgttggtactactaacagtactgtatttacatctactaatgcttcttctaaagaagagtaggctacgattgtgcttggcaatgtaatgcctgggagatatcgactattctcatgtttcgtattaatttcatccataagttctgggcgatttccccaaatacgtacatcatgtccattgtcagctaataccatcgctaacgctgttccccagctacctgctcctactactgtgatttttgtcataaaatcacatcctctccattagtctcttgctctagcgataatgtgaatcggcgttcctacgaagccaaatgattcacgtaagcgattctttaagaaacgctcatatgagaagtgcaataattctggatcgtttacaaacacaacaaatgtcggtggttttaccgcaacttgtgttgcatagaaaattttcagacggctaccattatgagttggcgtcggattcatcgctaccgcatccataattacatcgtttaatacgttcgtttgaatacggatactatgactttcatttacctcatcgataaccggtattaatgtttgtgtacgttttcttgtttttgcagataagaaaacaattggtgcgtattctaagaattggaaatgagcacggatattttcttcaaatgctttcattgttttttcgtcttttttcactgcatcccatttatttacaacgataacaacagctcgccctgaatcatgagcatatccagcgatttttttatcttgctcaataattccttcttcaccatctaaaacgactaaaacaacgtcagaacgttcaatcgctcttagcgcacgaagtacactatatttttctgtactttcatacacttttccttttttacgcataccagctgtatcaataattacataatcttttccatctttactatatggtgtatcgacagcatcacgagttgttcctgctacattactaacaattacacgctcttgaccaagaagagcatttacaagtgatgattttcctacgtttggacgtccaattaaagagaaacgaattgtgtcttcatcatatccgtcttcttcaatctttggaaaatgttgtgcagcttcgtctagtaagtcacctaaccctaatccgtgtgtacctgaaattgggaatggttcgccaaatcctaatgcataaaagtcataaatgtcactgcgcatttccggattgtccactttatttactgcaagtacaaccggtttatttgaacgatataaaatttttgcaacttcttcatcagctgctgttacaccgtcacgaccgtttgtcataaaaatgataacatccgcttcatcaattgctacttcagcttgttgacgaatttgtgtcaaaaacggctcgtctccaatatcaattccgcccgtatcaataatgttaaattcatgatttaaccattctccagcgctataaatacgatcgcgcgttacacctggaatatcttctacgattgaaactctttctccaacaattctattgaaaatagtagatttccctacgttcgggcgacctactatcgctattactggtttcggcatatactttcatcctttcaacttgcttctgtttattatgtaaaaaacccttctttgtgcaagaagggatttgcattccagaatatttctcaacgtatcaaaacacctcacattataacacacgttgctaatgtttcacaataatatatacattctcttgtaagcgatgtgcaataccatctaaaattgcctctaaattatttgcaacaaattctagttcctctgtcgattcgcaaacgaataaaggagcaccacctgcaaatttttctggagtcgttgttataactgccagaataacactttctaacatcatctcttatctccccttcctttcggggcttccgatgacatatggacagcactttctaacgttggtacatttcctatgacacctatcgctttctctgcatcttgatcttgcggcaggacaaaaatcccaaccctgccatcctctaaatcacgctttgctaacggtacaagcgctggtgtaccagaatctctataaatccctaacgctactgaaacatcgtgtaaaatagcttgtcgttgccctaaatttgagattgtaaccatcgcatcaattgatttcggctttaaaataaaacccataccatatttcataatttcttcttgtcttgctggcaatccaatattcataatgtaaatattgtcaatataaagccctgctccttcaaaacgaagcggaacgtgctcaatttcaacaagatcatgtagccttttaccagacattaattttttcgcaataaaaaatgcgattatagccataattactcctgcaatccatgaacggaatcctatatacgcaaacgtcgttgcaaacgacgttaacattgccaaatagttgcgactttcaaaaaccaatgcaattccttcaatgtatgtatttccacgcggtacgagctcatacccatctaattgttgaagcgtatttctttccatattacgtacatcacgaaattgtgtcgctgctaatgtaagaaatgtaatggcagaaaaatcttttttcaaaatagacgggattgcaatcgctcctaaagcagctgcaattaaccccattgcaatatgaataattttcccatgtagcctcgtcggatattgccgtgtatccgtccgaagcattagcacccttgtaactgtccctgctattacgccgcataaaatggctggtgtatattcagtcatgtattaccctcgcctttcttttacgtgtttttctcttaaaccgttccatgtatactgatgcttttgcaatccaaaacaatattgccatgaataatgtagaaatggcgacgatatcaaaaaatgctaaactaccgtaatcatatggaaaattcaatttcctaaaaataaatgtcactagcagctctccttgtaacatccctacatatagagaacataatcgtaatatgcgatctccatgcaataacaccgatgcatacacaagaccactacttagcagaaacactctatccaccacaatccaaatcggatcatatatttctaacagatgaaaacttgtatataacattgcaataataagtgccgaaagtaagctatataattttttccagacagaatatagcgtgatccctataaaagaaataatacaaagtaaaagagcatttactgataccacgaatgaggcgatcgttacatgtaacggagagcaaattataaaaatcagtatacaagcgcctaacttccaccgaataaggtcctttttcataaaaaaggttacaatgatccaccctatccaagctacaaaataaaaagtacttccatccatcaacttcacctcctatgttttccattatgggaactttttatgaaagttaatccactttatttacgcatagttttttcttataacagcaacacttttaacaaggaggtgttattcattatgggtaaagatcgccaagaacgaaaactacgagaatcacgccgcgttgaatccgatcgtgatcaatcactacaatatccaggtgcaactggacttgatacaccagaacaggctcgaaaacaaaaccagcactaattaatgcaaaaagacggtttcgatattgtacgaaaccgtcttttacataatcagtttaatgttttctatttatattgaaataatatttcacacactatatcctcccattacttctttttatcttcacctattcctattaaaaattaagttctctccagtaattcgacaacacaccatctacatttttcaaccctttttcaattgcaatttttacgaaatgatatttttatataatactaattcctttctccactttatattacgaaaaagaatagaacaaaaaaaatcaaccgaacggttgattttttatctcctactataatgcgcagtatcaataccacgctgcattaaccaatgatacgtttcaccctttacaacaagaggtacagattgcaactcttctatcgttttcgcaccaagagctgtcattataaatttcaaatctgtatgtaggagctcaatttcatccactaacttctcgataccatcttgcattaaaatacgtaaaaagtaaccagcaaacgcagttgtattcgcccctaatgcgatcgctttcgctacgtcaagcgctgtttgtatgcccccagatgcaataaaagagaggttattatttgtagaggttgcttcaataatcgaggttgctgtttgtatgccccagttattaaaataagaaagcattcgctgtcttctttcattttcaacagcagcaaaattcgtaccaccttgcccaccaatatcaattgctgttacacctacgttcgctaactgctgcactgtttccttactcatcccaaatccaacttcttttacaatgataggaactttactatttaaaacaattttctcaatgcgctgaagtactccagtaaaatcacggtctccttctggcatcgttaactcttgtatgacatttaaatgaatttgcaatgcattcgcttcaatcatatcaacggcacgctctgcctgttcgatagttgcctcactacctaaattagcaaagaaaataccatttggatttacctttctgatcaccttataagaagcagcttcactttcatcttttaacgccgccatttgcgaacctacagccatagcaaggttatgatgtttcgctacatatgctaattgctcattaatatgtaacgttttctctcctccaccaccagtcatcgcattgataaaaatcggcgaacttagtgaaagttcgccgatttttgtttcacatgttattgtgtcataatttgaatttggcaagctttgatgcacaaaatcaatatcatgaaagccatgcgtacgagactgaccagtagaaagagcgtattcaatatgatctaatttacgttttgcccttaccacttgtacccctcattatttctttaattttttcagttgttcaccaataatatcacttaattggaaagtagcagaatcagcatttggctcatactgactataatcttcagttacattattttcctcaagcgcttcttttatacttaaagaaatacgtttctctgctacttgaacttcaagtactttcacttttacttcttgtcccatttccaatacttcattcggatttttcacgtgacgatttgcaatttgagatacgtgtacaagtccttcaacgcccggtaaaatctcaacgaatgcaccaaatgtaacaaggcgttttactactccctcacgaatatctccagcttttatttcgccagcaacgttttcccaaggtcctggttgagctgctttaattgataaagaaatacgttgtgtatcagcatcaacagataacacctttaccttaaccttttgaccttgctctaacacttcagaaggttgctctacacgttcgtgtgaaatttgtgaaatgtgaactaaaccgtccactccaccaacattaacgaatgcgccaaagtcagttaatcgttgtactgttccttcaacaacgtccccttcttttaatgaagaaattgcttcttttttcttagaatctagttctaattctactaccgctttatgcgaaaggattacacgatttttttcacggtctaattcaacaattttcaccgctaatgttttacctttatagtcagtaaagtcttctacataatgtacttctacaagtgaagctggaataaaaccgcgaacaccaaggtccacaactaatccgccattcacaatatcttttacagtaacatcaaatacatgaccagaagtaaatttctcttgtagttctacccatgctttttctgcatcaacagcacgtttagataagacaagatcatcttcttctaatttaataattttcaactctagtgtttgatctaattctacaacatcgcttgctttttcaatatgaacgttagctaattcactaattggaattacgccatctgttttgtatccaacatttacaagcacttgtttctcttcaaccttcgttacagaacctgtaacaacgtcaccaacttgtaattcttttgaatccataacttcttcattcattttctctaccatggaaatacctccctacagaattgacaaagcattttttatgtatatacgaaatgaaaacaaagttttcatttgcatgtttaagaatttctcatcacatactctttttcaataacattcacaagaaaatatattaaacctatataaatagtatacagcaaaaccagcttgaaaaaagtatgttttgaaatataatagcgaatatattctgacagttttattcctctttaactaacttcttacaaatcagctcatttgtcaaggaaagagactcataattcacgtatcctttacatttctatttaaacaaaaaaagaaagaggattatcccctttctttatttcgcaaacactccagaaacaatgctcataattttttggacaacttcttcaattgataaagaagtcgtatctaattccaatgcatcatcagccttttttagtggagaaacttcgcgttctgaatctaatttatcacgctgagcaatttcttcttttagctgctctaaattagaatcgaaacctttatttaaattttctaaatgccttctttccgctctttcttcaacagaagcaagcataaagattttcacttcagcatccggtaatacatgtgtaccaatatcacggccgtccattacaacgccgccttttttcgctaactcttgctgacgacgtaccatttcttcacgaacaaggcgatgtttcgctacaatagatactcgattcgtcacatcaggtgtacgaattacttcagaaacatcttgtccatttaaaaatacaagctgtgtattttctccttgctgaaactcaatatttacattctttacaacttccattaactgctcttcattttcaatgtctactttttgttcaagggctgcatatgtaagcgtacggtacattgcgcctgtatcaatataaacataagaaagttccttcgcaacaacttttgccactgtacttttccctgcagctgctggaccatctatagcaattgaaattcgtttatccattgtaacacctcattttttcacttataaaacaaaacgaaaagcaggtgttcaccctgcttcttctcatttgcttcgcgtcattaaatcctcaattattgtagcataatccttcatagaagaaaatgaaaactaccgattcacctgcaagatttccactttgttttttaccataacaccctcataataaacgattttagataaatatttcactgatgacttatgtataaataacaattgtacaacagaaagacaaatgaattgtattattaatatacgaataaaaattctctccatctttttcaccgtaatttctccctcctatactatatttgcacatttcgtttcgtaattttatacatcgtacatatagcagttaattttattgtcattttcgaggcatacttttatacatttccattgtcgaatttactcaaaacatgttatgttctaaatgtatttttttacttgaaaggggtataagcattgaaaagaatcctagttttacacacaggtggaacaattgcaatggaggaagataaagaaactggggtcgtacaaccaggtaaaaaaaatcctcttttaaaattcattcctgatttagaaggcgatgttgatttaatcgttgaagatgtgttccatctaccatctcctcatatgacaccgagcgaaatgttacaattacaagtcatcattgatgaaagagtaaaacaagacaacattcatggcgtagttattacgcatggtacggatacattagaagaaacagcttatttcttagatttaacagtacaagcaactattccgatcgtagtgacaggtgcaatgcgctctagtaatgagttaggtgctgatggtctatataacttcttatcagctgtaaaagttgctagttgtgatgaagctgcagaaaaaggtgttttagtcgtattaaacgacgaaattcattgcgctacaaatgtaacgaaaacacatacaagtaatgtcgcaacattccaaagtccacaatacggaccaattggaatggtaacaaaacgcggcgttgtcttccatcacgctttagtacatcgcgaatcatatacgataaataaagtgtctaaaaatgtagttgttctaaaagcatatgctggcatggatgatacattattagcagcaatcgaaaatcttcctgtagacggcattgttatcgaagctcttggacaaggtaatctccctccaagaacactacctagcctagaaagattattaaataaaggtattcctgtcgtattagtttctcgctgtttcaacggtatcgttcaagacgtatattcgtatgaaggtggcggtaaacacttaaaagatatgggcattgtattcacatacggcttaaatgcacaaaaagcacgcattaaattacttgttgcattagagaatacaaattctcatgaatccattcaaaatatgtttatgcacgaataaaaaggagctgtcgagattttcccgacagctcctttttatttttctcttgatgcaatggtttgcgcaatcgcatctccatgaaatctaccgttctcgataaatatttcatttgcattatttccagcagcaatgacacctgcaatgaaaatattttcagcattcgtttccattctatcctctgtataaattggacgtcctgtttcttcatcaatctgaacacccatcttcgttaagaagctatgatcaggatgataaccagtcatcgcaaatacaaaatcgtttttgattgtaaaagcttcaccatcaactgtaaacgttaatgtatgctcagtaatctctttcacatgagctccaaaatgcatttgaattgtaccgtttcgtactaacgcctcaaattccggcaaaatccaaggctttatgcttggtgaatactcacttccacgatacagtaccgttacacgtgcaccagatttaacaagttctaacgcggcatctacactcgagtttttcccacctataactactacatctcgatcaaaataaggatgcccctctttaaaatagtgagctacttttttcaattcctcacctggaacattcatataatttggattatcataatatccagttgctacaacaatatatttccctatatacatttccttacttccatcacgctttgtcgtctcaacctgaaaaacttctccatctttttgaactttctccactcgctcaaaagcatttacacgtacagatttacgttttactacttcacgataatacgcaagcgcttgatttcgaaatggcttacgattttctgtaataaaagctacatcaccaatttctaatttttcactagaagagaaaaatgtttgatgagttggataattataaatggcatttacaatgtttcctttttcaattactaacggatttatccctaccttttgcaacgaaattgcagccgctaatccgcacggaccgcctccgattataataactgtttctttctgcatactcgtccactcctagtcttctaccaatgcactatttataaaaacaagaaaaaacctacttacagcagtaggcacctatctttattgtattcatttttcatatatttgtcatctaaacgaaacgtacatccgatagacatctgctaaaaactgctgaaatttaataccttgtttccctaatacattctcaggatcaatctttctagctggatcaagcgttttatgtgacacgatatcttttttcggatttaagccaaagttttggcataaatacgcatgataccatgtaaaacgattatacgcttcccaaaagttaacatcaccaccataacaaagttccactccaatggccgccttattcgcgtcatagccatataagtcattatccgtcggcacaccatatcgaacatgatacgcaacttcatttataggaataatctccaatattgttttatcatctataaatgtatgtgccgaagctttcggttgtaattcattaaagtaatctcgattgcctatcgcattgcttccaggattccccgtatcatggcttacgataaatctcactttagtcagaggaatccccggtcgtgaacttccatatccaatataattgcgctctataggaaacatcgccattgctaccaactcccgctctagaagattaccttacttccttatatatgtattcggtagcaatgtccttatcgcatatttcttacgcgaagagaaaatcgaaaatatttgaagtgaacaccataaacaacaagatacttacagccactccataaaaaccgtaaaaccaaacacaatcttctttcgtatctaaaccgaaaaatttatttaccgattgtaataatgtgccacgcttgctttgtttgtttcgtaatacttccactcgctctacaacatctgctggcatcataaatctttggtctactgtcattttcatcatttatctctccttaaaatcatttccgttttgtttatctaaggagagtatagcacgtttgttcgcatagaacaagcgttcttttttatttttattttattttatttttcagcaagccaagtaaaaattgagattacaacggcaataatcggccctactacaaccacaccaaatatcagaaacagtagcccttccccgaacatccgaacggtacttattttgcgagctttcatcgttcttgcgagttctccctctaacctattaaccttttcttctaattgttctactcgttccagcatttcattctccatatacaacacctcatttaatacttcaacaaaaaaacgtgattccctcgaaaggaaatcacgttttctcaagatataatattttatacccaacctctgaagcggcttgcttcagccattttacgaacaccaaccatgtacgccgctaagcgcatgttcactttacgaacttgtgctgtttcataaatagaatcaaatgatcttaccattactttttctaaacgttgttctacttcttcttcagtccagtagtaaccttggttattttgtacccactcaaagtaagatactgttacaccaccagcacttgctaacacgtctggaacaagtaaaattccgcgatctgttaaaattttagtcgcttctaatgttgttggaccatttgctgcttcaacaacgattttcgctttaatatcattagcattttcttctgtaatttggttctcaattgcagctggaactaaaatatcgcaatcaagttctaacaattctttgtttgaaattgtattgttaaatagctttgttactgtaccgaagctatcacgacggtctaataaataatcaatatctaatccatttggatcatgtaacgcgccgtaagcatctgagattgcaataactttcgcacctgcatcatgcataaatttagctaagaagctaccagcattaccgaatccttgaacaacaacgcgtgcacccttaatatcaatgccacgttttttcgcagcttcgcgaatacaaattgttacacctttcgctgttgctgtttcacgtccatgtgatccacctaatacaagcggtttacctgtaataaatcctggtgaattaaattcatcaatacggctatactcatccatcatccatgccataatttgagagtttgtgaatacatctggagctggaatatctttcgtcggtcctacgatttgactaattgctcgtacataaccgcgacttaatctttctaactcacggaatgacatttcacgtggatcacaaataattccacccttacctccaccatatggtaaatcaacaataccacattttaaactcatccagattgaaagtgctttcacttcattttctgttacattcggatggaagcgaatcccacctttcgttggaccaacagcatcattatgttgtgcacgatatcctgtaaatattttaacagtcccgtcatccatacgaactggtattttcactgtcatcatacgaattggttcttttaataattcatatacttcgtttggataacccaatttttctaacgcttcactaataacaatttgtgttgaattcaatagttcaaaatgttgttccctttgttgttgtgtttttgtttgagttcccttttcggctaccatagtaagtaaaccccctgtaatttcacttgtttagtaaaccttcattgcctagtatacacccttaaatttggaatgcaatagaaaacgctaacaaatatatacaaactattttctgttgcaagcgttttcactattattatagtccttttattacttttagaaaagtaaaatacttaaatatttaaatattttttattttcatcaaccacactcccataaaactgcatattttattttcaaaaagtatgttcgagtatttacaatcatcccttcccttctccaaataaaaacaaaacctcagctatgttgtattagctgaggttttgttttttcacgaagtaattgtgtatttgctctatcgcgttaacatccattaattctttaccgtactccatgatgcgataaatggttgctgtagacggattaccgtattccgctaaaatagctataaaatccgcctttaacaattgaatttgttcctcttcttccacccaaagatagaagcgctcatcccacgtatatagctttccgccagttacaccaaggttatataagcgattcgacaggttaattacgtcatctagcgtagcaaactcatataatatatgctcactttcatctagagtcacttgcatttcaataaactcgtcacggaactcatcatctgtatccatttcttgattttctttcgttacaattacaaccatcccttgtgcttgtagagaaaacacttcaactgcaatcggaccatctgcttcaaaccctaattccttatttgcttcttgcatcatatcacgaaataattgctgtactttcggtgcatttctccataaatcttctttcgttaatcctcgttcagataaatcatcaaatgttagaaaaatttttatcttattgtaatttaatcgttccagcctcatctcataccctccctacgtaaccaatgcatctaatttttattatatgaaatagaaaatagatggttcttttcgaacaactattccgacatttttaaccatccatcccattcttctttcgtatcaccaattaagattgtttcaatgtccaactggtttagaacgcctagctttccgataaatccaactaaaagagattcccttttttcttgtaataaatttataaagttcatcgtctttttcatttcttgttcgtcagcaaaagatacaaatacatatttcggctgtatttcctctaccgctgataacataccatcttcagctaagcttgtcctaatatatatcgcctcatatccttttaagcgtaaataagttgaaaaaataaatcctttcaatgcatccttttctaacacaataactttgtgtaaagaggaaaacattgaggcattgtgatacaccatccctagacgcatttgtaaaaatgatagtgcatattgaaattgcaccattgaaatctcattattattttttgacgttaataatttgtctgtcactcgaagaacaatactggcaacaaccttctctgttgaatatatactaaaagcttcgtttaataatgcagcaattgtaatttcatcaaattttaacaaagcttgtagcaaatcgtccactaaaacaacttctttatcgaaatgtatctctttttgaactgtactctgcaaacgattctcttctaataatcgaactgcttgtccaatcatcataccggaagaaactttttccattaaccattttaaaatttgaatatgctcttctgtatataaacgatgcccagcttgattacgctttggggcaataatttgatatcgtctttcccatgcacgaagcgtactcggctgaactccaattatattcgaaacggcttttatattatatttcccactaagagttggcatcatttccctccgcacaatgtaatgatgtgtgtttgagcaggtgctcggaaacgaagtggtatcaatgttgttccatacccattactaacaaagagaatcgtatttaaatggttatatacgccaccttttaaatattttttagatgggaataatcggatttgccctccatgcgtatgtccacttaacacaagtgaaatctgttcatttccagacattttttttattatatcagggttgtgactaactaggatacgaaaaccatcttctttacaatccgccaatgccaaatctagacgatcacggtgcaatccaacatcatctataccgagcaaacaaattttctctcctaattcagactcaaataccactcttgtattatctaaaacttttacgttattttctaataataacgcatctaattcatgatattctatctcataatcattgtttccccacacaaaatatacaggagctatctctcttaacttttgaatattcgcagagatttttgataaagagacacctttctctgctaaatctcctccgataattacgagatctacttttccttttacttgttcaattaacaaattcgaaatgactcttctatgaatatcagaaataaaaaacacatttactttttgaaaacttttcggaaattctttaaatactaaagtatgttccaacaccgtattacgcatcgcttctttatacatcacaagaagcaataaaatccccatgcctatgagagtactgaataatataatccatatcatatttttgactcccctcctcataaagataatcctaggcttttataacaaactgtgatcgcttaactcactagctttcttgctttgcggacttatcttttatcggaatttttaattcttgacctgcactcacttcatcttcttgcaagttattatactttttaattacttcaattccatttccatctgaaaaatattgcttcgctatactttctaaagtttctccctctttcacagtatgcgttattactttttcagaatgtttctgcgactcagatttagctgaatcaaagaagattacttcaaacgcactttttccggcattattactatcacccttcacctgaatatatttatccgtgtaccacaaaatactaattggcagcagaatgaatagaaatgttaaaacccggacgaaaatgtgatttattttaaacttttgttttttttctttatttctatgaatttcactacgcggcggtaaactttctttttcttccactcgctcaacttctaattcctcttcaaaatcaggaattcgtttcctcatgttgttcaccaccaccttccatttattttcttaattggagtcccattataaaatcaacaagaaagtgtgcaaagattgttataaacaaatttcctgtccattcaaatacataaccaaagacaaaactaatgaaacagacgaaacaaaacaaaaatggctttgttatataacgaatatgtaacactgcaaatacgaagctcgcaattacaattccaaaatgagtctgtactacacctctaaataaaaattcttctgcaaaaccaattaagaacgtaataacgagtaaatgcagaacggacattcctcgaaacatcttatcgttaataccaccatcatcaaaccaagactccggaaacactcgcattgcaacataatctaataacacaataccaatcgctaacaaaccacctataataagtatagatactggttcccatttccataaattaaagacttcttttacatcttgaaataatatatatgccagtaaacagccaataccgataataattaactgtgttatatatagattcagccttatttcctgcggactcatatcttcaacattatgcctttgaatgttcatcattcctccatcttttctaggccgaaaagcttttgtaactctgtttcccaattatagtcgaaatccgattgttgcgctcgtctttttttataatcttcttttgtaataccgcaataatcgcagcaattaattaactcttgctctttcctataaccgaactgttgcagcacatattcacgtctacatcctttaacttgtatccatgacttcatattttctagctcactatatttattacgcaaccttatttctacttcagctattaatcggttcataatttcatctgacaaaccttctaataataatcttcgttgttgtataattccaacctgttcgagatgataacgaacgaaacgccaatattgctcattaaatcttgctgcattataacaaatttcttctacatcttctattggtaattctttcgtttgaaacattctttcttgtagtaaagaaaataaaaattgtatttgtgacttacttggcaattcatcctcaatgattgaaattggtaaatcatgatccaacggactacataataaaatagctatactcggttcgccatctcttccagctcttccgatttcttgtaagtaagaagctatattagttggataatgaaaatgaataatatatcgcgtattcgccttatttacccccataccaaatgcacttgtgcatattacaagttgcagttgatcgttcataaactgctgttgaattaacatacgctcttcatgttccataccaccatgataaaaagctacaccagtaacaccttttcctctcaagtattccgttaacctttctgtccacgctctacttgagcaatatacaatccccggcccttgtaaatacatcacctgctctaaaagcgcctctttcttttcttctatcgtctctacaaattgcacatccattgcaatattaggacggtcaatagagtatacatgttctgcggcaccctttaaatttaaactatttgcgatatcctgcagtaccccttttgtcgctgtggctgtcaatgctaatactgtaggagaaccaatattttcaataactacatttagttttttatagtccggtctaaaatcataaccccattgagaaatacaatgagcctcatcaacaacaaataatgaaatatgaattttcttcaattccttaattaataactccgactgtaacatctctggtgaaacaaaaataaatttatatgaagataattttttcatcgcttctcttttttcatttaatgtccgaaaactattaaatgctattactcggtttttcacaacatactttaattgtgtcacttgatcttccattaaagataataacggtgatacaacaagcactgttccttctcgcataagccccggaaactgatagcacatagatttccctcttccagtcggaagcattgctatcacatcttttccttctaataaatctgtaataactcctttttgacctggacgaaattcagaatatccaaaccacttatataaatattcttcaagtttcatttacaccctccatccgcgctaatacaagacgaacttcaaaataagagatatcttctccaaccgcttgtttcaaaacacgtaacttccgcgtttgcaatgcttcaattacttttattactttgtctatcttttctttttccataaacatttcaatagaaaaatctttttctcgcaaagcaatttcaacaaaatgatcttctatcgttgcaacctttaaattccgaatcgtcgctatttcttctaaagaacgtccttgtctccaaaaattatatgtttttttcgtggataaactaaataattcagctctctcatttggataagatataatttcagctaatagtggaaattcattttctttatcacgaacttcttgtataaagaaatgcattgtaccccaaaataaaaaatacaccctgaatatatcttgtttcgtaatttctgctaattgttgcaatgtacaaccaatacgttcataacccgttagtcgatatgttacaatcgtcgcttctatcgtattgctcttttctaaaagattatgtacttccgtccatagttttctcgccaactcacttctcttatatggtattcctgttagaaaacgtttcacccacatcattatttctgtatcttgctgaattgggataaacttcgtattattctgttgtaaatttgatatggtttgaataattaatgataatcttttccaaaatgtttcacctaattcaccataatgtaaaccatgcaaatgcgccggaaaagcataaacttccccccatttatgtaactgcattttacccgtaggtgttaacacatatgtattttcatgtatttcttgaataaaattcgcttgcaacaactttgcaacttcaccatcatagtcatttctattcaatgatttatatattccgaacaaaaaagaaattcggaacatatttccatcttgtaaagtttgcgaagaacgtttgccctttagtaaataataaatagaagaaacggttctttcaccattcaattgttttaaacaatgcaacaaagtatattgtatttgcatgaccgcttccaccttccaatcttaacttcattcttttcagtacaattacactatctactttcgctcattaaacttatcatataagaactatatacttgtatatattctattgtatcaaacgaaatcatatttacgtattttgaaaatcttatgacataattcaaaaataagttgacactctaattgataagcattatcattataattttatgttgaaaagttttacaaaccgttttacaataaggttataatttttatggcgagcttttcacatacatattatcaggagggaaaaaagatggcaaaatatacaatcgttgataaagatacttgtattgcatgtggtgcttgtggcgctgctgcaccagacatttatgactatgatgatgaaggtattgcatttgtaacattagatgataaccaaggtatcgttgaaattccagatgtattaattgaagatatgatggatgcattcgaaggctgtccaactgactcaattaaagttgctgacgaatcatttgacggagacgctttaaaattcgaatagtcttttattaacttcaaaaaatgcccctcatattgatgaggggcattttttgtatctaaattttattttccttaataaaaaaccattagtagtttcacactactaatggtttatatatatatatattatgcatttttcatttttgcaaacacccatactttcaggcgtgagaataatgctacaaatacaattgttacaacaatccctttaattaaattaaatggtaagattgccgttacaaccgttgttcttatagcttcgctagacatagccggtgaatttaaaaaccaagtgtaagccgggaatatgatgatgtagtttaatacactcataataagtgccattgtaattgtccctagcattaatcctgtagttaaactcttcacagtacgatactttctaaataagaaagctgctggtccaataaataaacatcctgcaataaagtttgcaatttctccaactggtactcccgttaaacttccttgaatcccgtaatgtaaaatgttctttatcgcctctacaatcactcctgctactggtccaaagataattgctgcaattagagctggtacatcactaaaatcaattttcaaaaatggcggaagccctgggaacgggaaatctaacatcattagtaaatatgcaatactacttagcatcgctacactcaccatctgcactacactgtttttttgtttcatctttctctctccttttccatcgatcatctcatggaaagtggaaaggttctgctatgcctattttttcatagaacgaaaaaaccctttgtgttttacacaaagggagaatttaaggcacatcaaacagacgttcaaatccatatcttttttgaacgcttgaacctccatcttctcccatccagactatactgtcggctttggaatcacaccaaatcctgccttaacggctcgcgggcttagaacaaaatcataaatagttcatcaccgccggtcgggattttcaccctgccccgaagatagaccgatattctattttccccttcattatacaacaacctcataacattgtgaactaaaaaattgtaacttatttaaaattagttatttatttttcgtaacgacaaataaattgcgagatattttacaatacaatccatattttttattattcggcatttctcttttgaattacctagtcatatataattaaaagtgataagatattgaattgttaagataagaacattttctgagttatggaggaaatgtcatgaaaaaagacaagagacattctattcgagaagcaatgaaaaaaaacttaagaaaagaatacttttacttaaaaaaagaattacttttctactgcccaattgatttaggcacattctcaaacgagacatactatgctactttcgatgaagatggcattagtatttatcagtatgataaaaaaacagaaagtaaattaaaaatgtgtgagcgtcatccgtggaagagttggaataaagtgaagattgatcactatttgacaacttctcaatttatttttcagggtgagcgaaattggatcttatctctttttcaaaaaggaaaagaagctcaaaaaattattgaagagcatacatctttacaaacagaagttgtttcccgctctttcttaaaaaaacttcctggttttcgttctaatacaccactgaataaatacatcggtagtatttgttacactgcacttattgcatttttattaaaatggatgattccatttcaagcaccacaaatcgccctgtattctatttcgattggttgtatgcttcttggcctactttgtttgacaatcggtttaattgaaccaactatcgtactgtttcgaacaaaagagaaaacaagaacaaaagttttttacttatatagctatttagctatttctggatttatatgtgtctttattttttggtaaaagaagccgtcccaaaataaattttgggacggttttcttttagatatagatgctctaattcactcaatagttctagcaaaagcgcccatataatttcatttacattgaaccttatttaagaagaacataaatttgttcaaagtttaatttttgaaatgtttccttcacttaacatataattgttgattaggataaattagctcttgctgcaatccatttttttctttaatttccttaagtgtcatactaaatttccgtgcaatactaactaaagtatcccctttttgtacgacatataatgatgaagaaacaacttcatttctttgttcatttaaaacaagcaatgggttcatcgcattctttttcgccatcgtccatcttccttgatgaagttctagatgtaagtgtgcacctcgcgattctcccgtgttccctacttctccaattttttctcctttggaaatataatctccttgccccacatatctcttatttaaatgtgcatatacagcctcatattctccgtgtttaataaatacaacatttccataactacttgaataataagacttcgttaccctaccatcttgaatagctgccacaggcgttccaatcggcgcagctacatcaataccatagtgttttccatgccttgtcccaaaataatcacttatctgaccttcaacaggccatgtccatcgattttcttctgcataaacatgtaattgagatacaaacagcatactcaataacatgacgccgcattttaaaactttcatatacatcctccgttttctaattaccaccataccttctctattttggtatattacagaaaaaagtatacaaaaaaagaaagtgaattactccacttccttctctttcttatcacgaaaaactaatgcactacggttatactccacatctttcacttgtaatcgggcatttattactcgagctatcgcaaacaaataatcagataatctatttacatactttaagacaacttcatttattttcacttctttttgcaatgatactatagagcgttctgctctccttacaacagtacgtgcaatatgaataatagccgccgcctcgctaccacctggcaaaataaagcgttctaatggcggggcttcttctatatataaatcaatctttctttctaaactttcaaccatctcaattgtcactttataaggaattttttgttccactattgccaagtctcctccgcaatcaaatagttcatgttgaatattttcgagctcattgtaaatatctctaaaagccccgccttgaaccttagtcattgcatatccaatatgagaatttgcctcgtctattgttccatacgcttccacacggatatcatctttatcaaccctgccacctattacacttgtcgttcctttatctcctgtttttgtatataatttcatttcttcacagcaccctctcttgttattcttgattcgaccaagatagaaaaaagttctaccattctttatttaattgagtttacaaaaaaataaaaaacagcagaactttattcattatcaactttaaaaaagcatatctaaattatacgattcggtaaatatacagagaatgtagttccttctccaacaacacttgatacagaaattttaccgtcatggccttgaacaatatttttcgcaattgcaagcccgagtcctgtgccaccctttttcccacgtgttcttgctttatcagctttatagaaacgatcaaataaaaatggaatatcctcttctggaatgcctacacccgaatcttgtacttcaaaaatgaggccattatttttcgtatcaattacaagcgttacatgtccacccgcattcgtatgacgaattgcgttatcaatcaagttcgtcaacacttgttccatccgatctgcatcaaacgcatattcttcaatctgattccggaaatcaactgttagttcaacttctttatcctttgcaatcccttggaatttacgaccaattttttccacaaacggatgtatgtccacttcaccaatatgtaactctacgtgaccgctttccatacgagctaaatctaacaattcatttacaagtttacctaaacgaacggattcatcataaatgatttgaacaaactcatctatttcctctttcgtttgcacaatatcatctaaaatcgcttcactatacccttgcagcatgaccatcggtgtacgaagttcatgtgatacattcgcaataaagtcttgacgcattttctcaagacgacgttcttccgtcatatctcgcagtaccgctacagccccacgaattttcgtttgattgtaaagtggtgtcataagaactacatagttccctttttgtaaattaatttcaacaacttgttgttgctcgctttctacaacgagatggaatagttccacaagttcagaaggtaattttttacttaactctatctctttttcttcttgccaaacttgtaagaaatgttcagccggtggattaataactacgacttcaccttcttgatttaacgtaataactccatctgccatactactcaaaatactagctaactgttctttttcttgctgcaaagcattcatattaaacttcaactgtttacccatttgatttaaggccgttgccagctcaccaatttcgtcctgagataccataggagccttcgcatcaaatttcccacgtgacacttcaaaagcaacctcacgcattttacgaagcggtgctgtaatccgagtagataagaagaacgcaaagaaagttgttaatataatcgcaatcccagcggctaagaaaatgaaatcagtcgttctctccatatcttttattggcacttgtaaagattcatatacgaacactgcgctttgattttttgattgcactggtttcccaacgatcacaatatcattttcagtgcttttattctttctactatcagaagcttttctaatgttgttcttaatttcttttttgtccgtaaaaacagcggctaattctttatcttcttttaaattatccattgtaagggtgactaacccttcttgtttcggtgaagaagagatttccttgccatcttctacaataataatccttgaaagtggatcagagaatttgtacgcgatgttctcaatcgtttttacatcggcaccttcttcaattaattccgtaacacttgttgcgactttttgaagtctattttcactcatatcaacataatacgttctaaaaaattgtgaaagtaaaatcgcaacaaatccaagaacaaacgaaacgagaagtaatatggtcatccataacttccctactacacttctccaaagcatcagtcgttcacaacctcaaatttgtaacctacaccccaaacagtaacaatcattttcgctgcatctggtgattttttgcttaacttctcacgtaaacgctttacatgtgtatcaactgtacgtaaatctccgaagaattcatattgccatacttcttttaacagctgctcacgatcgaatactttatcaggagctttcgctaaaaataatagtaactcatattctttcggcgttaagtttacttcattgccatctgcagtaacacggtgtgcatcgttatcaattgttaagtgagggaatacagtaacatcttttgtcgttgtatcttgtgtaaagaatgttgttggtacagcacgacgtaataccgctttcacacgtagcacgacctcacgtggactaaacggctttacaatataatcatctgttccaacttcaaatccttgtactctatttacttcttcaccttttgctgtcagcataataattggtgtcgctttcttctcacgaacccctttacatacttcaatgccatctttaccaggcatcataagatctaataagattaaatcgtaatcattttgcaacgccatttctaaagctgtatcaccattatctgcttcttcaatcgtatattgttctctttctaagtacattttcaataaacgacgaatacgatcctcatcatctacaattaaaattcttgattcattttccatctctacccgctgcgtactctcacctcagcggttcacacctacccttctttaactattatgttgcgctattctcgtttatttaagcaatcttctaaatgtttcacttcccatattatgcttcacaagaataataaattttgttcaatttttttccaaaactatgtattttttttgaactgtatataatgtcctcgacatcattttacaaaatcaaccgctactttgtcatgtttttctcaaaaaagaagaaaagttgacaaaaataaaataggaaagtgacatgcactctcctattttatttctctatgcatatgaatgtaaaccggcaataattaagtttactacaataaagttaaacataatgattgcaaaaccaattactgcaagccaagctgatttctctccatgccaccctttagataatcgtaaatgtagtactgcagcataaaagagccacgttataagtgcccaaacctctttcggatcccagccccaaaagcgcgtccacgctatttgagcccaaatcatcgcaaaaattaatgcacctaatgtgaaaactgggaatccaattgcaatagatcgatatccgatttcatctagtaaatcactattcgtattctttactaacggctgaagtgccgccgatactcgcttccgtaaaacgagtcttaatacaatatacagtaatgttccaactaacactgaccaaataacagtatttaatttttttgcatttacaattgctggaacttcaactgccggttctaatttattttctgtcagtaacttcccttcatgcggtccaactaaagccggaagattgtacttcatttccagttgttgttcatttttatcaatccattgaaacttcgcttcatatttcatactagaaaataccgttgttactccaataaatccaactgtacaaacaagtgtaaatactaccgtctctagccaaaatgtacgtttacttctcgtcgattgatctacatttttcaataaatacataacgcctgtaataaaactaatcgctaaaatggcttgtcctgctgctgccgtcgtcacgtgaatatgtaaccaattactttttaaagatggaataagcggagatatttccctcggaaacatacttgcataggcaattaataaaagcgcaactggtaatgcaaatagtccgattatgcttacacggtacataaaatacatgacaataaatgctcctacaagcatcatgccgaaaaatgtaccgaattcaaaaaagttactaactggcgcatgccctgatgcaatccaccttgtaacaaaatatactgtttgtgctataaaccctaaaattgtaatcgttattcctacatttgcccatttatgacccttttctttaatggctcctccaaaaaatagagtcgcaattaaatataaaataaatgcggtaaagagaaagttactacttatttgcaccatatcgtttccccaccttaactaatttttttatcaattactttatcatttggctgtggaattgttgtaccttctattactctttcaatatctttctttaaaccgaaccaatttttatttgtatgccctgcaatccaccattcatcattaacacgttgtatccaaatacggcgatgattccaatacataccttgaatgacaccaaccataaatataaatcctccaatgccgagaatccaaagcgttaaatcttttcttacagtaagtgctgttgcattttgcatttcaacacctgcaaacgacattttatatttgttgtttccatctggttctatattttgctgaataccaacaaaactcacttcgccatctggtgtttcaggtgtaaacattttaaatacaaatgcaggattgtttggtaatttcgttttcgtatttggttttccattctcatcaaaataaaaatcaggaaaatagcttaatagttctagagaataaccagttcctaaatcatatttttccttaggattcgttaaatctactttaatcggtccccacttttgattattttctttattttgtaagttaaaggacatacttttaaattcactttctttataatccacttgatacactgcaaattgatcaaatttcagtggttcattcactcgaatttccgcttcttttactttttctaatttcggtttttgtcctgctatattttctcctactgctttatataatacggcattcgtttggaagtttttcgcaatcattttatcgcctacacgattaatcgcttcatcaaaaacttccttgtccttacttttatcataaacttcttttataaatttctcgttttttaagtagtattgtccatccgtccctggtatctctttcgtttcaccgtcacgtaaccaaagtgcttcgtctacgtacatactcggtaaaaaacgaagcatcgcaccgaataaaaagataataagaccgatatgatttacatatggaccccaacgcgagaagcgtcccttttctgctaaaacgtttccgtcttccactttcacgttatagtttcttttctttaaattcttttgcactctttccaggtcaccttcttgcggtgtaccagtcccatataatctctgtctctttaaaaagctaggatgtctttttacgccttgcttttttaaagctttataaagtggaataacacggtctaaactacatatcacaagtgaaataccgatagaagcaatcaaaatcatataccaccatgaaccgtataaattattaaaccctaattgatagtataattgtcctaaaaatccgtattcttgtttataatattcagctggtgcaatccctggagttatgtacatttcttgcggaaaaatagttcctatcgctgatgcagctaaagttattacgattagccatacacccacttttacagaagagaaaaagctccaaattttatcgattatcgtttttgtctgcgtgagagatctccgtgcactcccctcatagcgcatatccaatagttttgtattttcattgctttcaaatggtttcccgcaagcttcacaaaaaacggttcctatcggattaacatgtccacattcacatttaatttctttcaacactctcaccgcccctgtatctatatgtactattgtatattctaacctcaagttaccgcaatactcagaatttttaaaccagaggcactatagacacgcaccccttatgtaaaggctttctttattacggagtaattttctttaaatacccttctaactgttctttcgtttgttcacctataatttgctccactacttttccatctttatcaatcaaaaagcttgtcggtaatggacctactccatatgttcctataatcttttgtcctttatcaatggcaactgggaatttcaaaccatactggttcacaaagttctttactgcaatatccgtttcatctgcatctaacgctatgatttcaacacctttttctttatactttggatataattcattcatataaggcatttctttttcacaaggtttacaccacgtgccccaaaagtttaaaaatacaccttttccctttaaatcttttagttcaattttcttcccttctaaatccgtcacaacaaagttaggtgcttcttttccgatttgcattttctctttattagcaaagaatccttgataaagggtaaatcctacagcaccacataaaatgagtagaataataacgcgaaataataagcgatttttcttcatattacttctcctctcctcgataaatgttatgtattatcttctgtaaatgttgtattgaataaatcaccagcagagcactccactggtgaatttttaactctatagcttatcttggctttgtagaagcaagcgcgcgtaattgtttcacctcatgtggtgtcaattctctcgcatcaccaggtcgcaggcttcctacttctaagaaagcataacgttcacgttttaatttcactactttacagtctaacgcttcaaacatacgacgtacttgacgattacgtccttcatgaattgttaattgtacaatagccatctctttacgcttgtcccaagaaataattttcacacgtgctggtgctgttttaccgtcttctaacgtaacaccgcgttctaacatgcgaattttctcacctgttaatggcccttttatttttgcaacatatgttttttcaactttatatctaggatgcattaatacgtttgcgaagtccccatcgtttgtcattaataatacgccagacgtatcataatctaagcgtccgattgggaataaacgttgtgtaatttccgggaaaaagtccgttacaacacttcttcctttatcgtctgatacacttgaaattacgccagttggtttatatagtaaaaaataaacaggttcttctttttcaagagggatgttatttacttctactttatcttgaggagttacttttgtccctaactctttcactattttcccattaactttcacttttccttgctgaattaattcctcagcctttcttctcgatgcaatacctgcttgcgcaatcactttttgtaatcgttccatttctttttttcacctcgaatttatcttaccttacattagaaagacttggcaaccgcatacgctttacggctattcgcttcatcttacttaaacaacatagcgatgataataaacatataaaggtcaaatcatgtttttaccctttattattgtccatatttttcatatttctcacaataaaagttcatcattttgtcaaaaataccacataaaaaaaccactattaagctacaccttaatagtggtcgtatacgtattataagcgaaatagcgtaaaaaatgaatagtattactgaaacaataaagaaacgaacacaattgagcatataatcccgattaaatctgcaaaaagtcctacttttagtgcatcacccatttttctaatcccgaccgctccaaaatatacagttaaaatatagaaagtcgtatctgtgctcccctgcatcgtagaagccaatctcccaataaacgaatctggcccatatgtggcaattaaatcggtcgtaatacttaaaccagcagagcctgaaatagggcgtataagtgctagtggaacaatttctgctggaacatggatcaaatctaacattggcttcattaccgatatcattgcatctaacgcacctgaagaccggaatatagaaatagacacaagcattccaaccataaacggtaagatggaaattgcaatttgaatcccttcttttcctccctcaacgaacgattcatacgtcggtactttctttattgtgccatataaaaggataaaaccaattacacaaggaattacccataaggaaattgtatttacaatactcattttttccgcccctttctactccttcttcggtaaaaatagcggtcaatccaaattgctccaatcatagaaagtacttgtgcaataaatgttaccccaacaatttcagtaggattcgctgattcatacgtcattcgaatggaaatgactgtcgtaggaattaatgtaatggctgatgtatttaatgctagaaacgtcaccatagaacggctcgccgaatcctgtcctccatttaactctttcagttgttccatcgctttaataccaagaggggttgctgcattacctagaccaaaaaagtttgccatcatatttgatagaataaatcccatggacggatgatcctttggtatttctggaaacaacctttttactatcggcataaaaagtgtaactaatttttttaacaatccggcttcctctgcaattttcattaaaccgagccaaaatactaaaacactaataagtcctatacaaatcgttaccgcatcttttgctccgtcaaatacagctttattcacttcttccatcgtgccatttatcatggcgtatacaatcccaatgacagccatcgctacccatacgagattaaccatcgttcccaacacctatcatgtaagaaaaaatttctttcacattattccagtaaagtcccgttgtagctactaacttccgtttactataaaataaattccgttctccaactttttcattaccaacataaatgtctgtcttcccaacctttactccatccgtaagttttatacttttatggagttcaacttttaatactacgttctttttttcttcttcagttaacggtaccgaaaaactatttttcgtataaacatggttggcatacttcttttcatttatttcagcaattgctccttgtcctaaaactttcgtttgtttgaaacgttcaaaacctttatcaaacaaattcatatgatcatcccaatcactagaggcactcaaagttacgacaattaaatctagtccatcttttgatgccgttgtcacaagcgttcgcccagctttcttcgtaaagcctgtttttcctcctgttgcaaattcataataagacgttaccagcttatgtttatttttccacgggtaatcccaagaatctgatttatatgttttggttccaaagattttcttaaatgtctcgtttcccattgcatatttcgttaataatgccatatcgtaagcagacgaataatgtgatccatctccatctaagccatgagggtttgagaagtgcgtatctttcattccaatttctttcgctttttgattcattaaatatacgaatccatctatactcccacccacactttcagcaattacttgcgctgcgtcattaccagatctaagcatgagtccgtatactaaatcttctaacttcactttttgtccaggctttaaatagattgccgatccttccaccctcaccgcttcattactaactgataccatttctttcatcttccctgattcagcagctaataaagcggtcataatttttgttatactagcaattttttgaggctcatgttctgcttttccgtataatacacgaccagactgttgctccattaatacagcatttcgagcactgacattgctgttcatctttgcatatgtaggaatcggcataacgcttgcatacatcataagaagcgtaatgattacacaaattcgtctcatatttccccccacgtccttttggcactttttgtacaagtgtatgcttggccttttaaaatatgaacgaaatcttccttctacttccattaaaaaagacgcagagaatttgcgtctaatatggtgtccattcaatttgtttcgcagtttcaaaccttttttctacatcaggccaatttacaacattccaccagtttttaatatattcatcttttcgattttggtattgtaaataatacgcatgttcccagacatctagtacaaggagcggtatcgtatcccattgtgtaaataattgatgaagtgtactttgcaaaatttctaaccttccagaccggggtacccaaacgagaattgcccagcctgaaccttctactttagaggccgcttctgtaaaatgtttttggaaacgtaaaaagctcccaaaatcttgttcaatttgttgtgaaaaagctcctcttggacttccaccaccgtcttttttcatgttattccaaaatatcgtgtgtaagtaatgacctgacccatgaaaagccgcttccctttcccaatgcttaattaaatcaaatttatttgtttttctcgcttcttccatcatcttctctgctttatttaacccttccacgtaactccgatgatgtttatcatgatgtaacatcataatttctttagaaatatacggttctaatgcattatacggataaggtaatggcgggagtgtatgtcctccaattgggacagctcgttcactatcccctctttcatataattcatattcctcttcttcttgcataaatacttcctgcaagtgatgctgaatgtgttctacatcatcgcttatttcatacataaactctgcatctgtttcatactcatgctctttcatacgctctaataacgtctgaattttataagcaagcatatggacatcatacacttccattgcgcggctatctaatacgtgaagaacactttcacaccaattttctacttcatgaaagtaatctgtaaatacaccttgctgattcatgttgcacctccctaatgctatccacttaactatattcaatgaaaatcccttatataactgtacaaaaggaaaagaagctaagtcaccttagcttcttttcctcaatcaatatttgtgtaacatctttgtctgataatccgtctcataatattctagttcttcacgcatcaattgaaatttaccttctaaactcttcatcacttgctccaaagatgcaggtggtgtttgttgaaaaacgatagaatttttccctgtatatgcagaccgactattttcataccaatgatcactcttcggtgaaaaaaactctgcaattacttgatggtaaatcttatataaaattttttcagctgctgtttttcgaaatggctggctattcaacaaaacaaaacatgcatcctgtccttcttcgcaaaaaacgagaagtcgtctcattgatgctaatacccctttataatattgctcattccctgctggtgtttcctctaataaagaaggtaacgtatgataatttacataattggttatcaaattaatagcatcttctaaaaatatagaaacttgttctgtttgattttcaaccatcaaattagacatttttctctctcctttgccatttcacgctatttctactcttttatttttatgtaattcagccaatatttcttgtactttcgacaccgttccctcatcaaaatattgttgaaattcttccatattatttaaatacaaacgtttttgcgcacgaagctccttatctttcactaaacaacatatcgctacaatatcacgcaaatatatgttttgttcttctactttatacactggatttccttcaaaaggagtaatttcttgtaaaacttcttcaaaatatcgaacgtataaaaccgaaaaagttttctctttaccatttaatatatatgtcacttcagatctgttaaaaaaatcttctgatgtattaggtttcgctttttctaactcatatcctacataaccttttataatcatatactcccctcctccttctttcatcttattctaacttaattttctgataaacaaaatattcttttaaatatacctatataaaaaatagctcgcctatacaggaatttacctttttatttttcttgaagtttgtcataataatattattgtctcagttttcttatacaaggagagttgtatttatgtcgttttcatggaaacgtttcttacaaatcgggaaaattgtcttcccatttgttgtattaacaattgtattctttcaagcaaaaaaagaattagcgggcatttcttttttagaagcgattgatacaattaaaaacattccaactggaggagtctttttagcaattacacttggtgcattcgctgtatcaacaatgttcttttatgactatgttatgcttcgttacttaaaagctgatatccctgtccaaaagattttccgtatctcgtggattgctaatactttaaatggatttatcgggtttggtggtcttgttggagccggcgtacgcacaatgctttatcgtccatatataaaagaaaatggaaaacttattaaaagtatcgcttggatgacaactgcctttattaatggattagccattctttcatttcttggtctcatcggaatattagacacgagatttattttgcatgaaaaaccatggctatggcctgttcttatcttcttcgctcttttcgtccctatatatatcggattttctaaattaaaaaatagaaaagcgacgcaaacagaggaacaagaagaagaagaggagaaaaacccaactgttttatactcattagtttcattagtcgaatgggtatctgctggtattgttatgtacgtcatattactattatttggcattgaaatcgaattccaaaagtttttaggcgtatatgttattgctgctttagctggtgtcgttagtcttgttcctggtggccttggatcatttgatcttgtcttcttaactgggcttgggcaatacggcatcgatacaggtgttttactccctgctatgttattatatcgtctcgtctattacatcttgcccttctgccttggtctcatttttgcagcttttgaaatgacaggagtagccattaaaaagtttgaagataaaccttttattgcgcctgcattagagacaactggtgttatatggactttgcagcgtgactttctaggaaagttaggttcttgggcatctgctgctttaacagtatttgctggcttaatggttattttatcaaccattctaccgacaagtataaatcgggcacacgccttacatattctagctccaaaacatcttattcaattttcttttagcttatcgctaacattcggtattctcctcctcattctttcgcgggggatatattacggaacaaaacgttcttattatatgacgattgtttctttaatcggagcggctatttttaacacactaaaaggaattgatgttgaagaaacttttattttattaatcgtactcgctgtattgtatatgcttcgtaaaaggtttgtacgtgagaaaatggaagtctcactttccgatatcgtaaaagtttttatattcctacttgtaacgttatatttatataaaaacttaggtattttatttgcaggtgcaaaagaagctttcaaacctgattttgtcgttcgtaatattacacaagtgaaacgaagtgcattagcagctgccttttttgttcctacttttttactaattggttcactcattgcaaatcgttatcgaaatgaatttcccgggcaaccagctaatgataaacgattacaaaacttcttagatgaacatggtggaaatgtacttagtcatttaggttttttaggagataaacagttctttttcagtagtgatggaaaagcactcattctcttctcaataactggaaaacgacttattgtactaggtgatccaattggggacccttcctcctatcgtactgtattgcaagagtttttagctgaggctgatcgatttggatacatttgtgtattctatcaaattgaaagtaaatggatgagtttataccacgattttggttataacttctttaagcttggtgaagaagctgttgttgatttaaatacctttacaataacaggaaagaaacgcgctggcatgcgagctactttcaaccgttttgaaagagaaggctatacattctctattcatgagccacctttctccgacgaattatatgaagagttaagaaaagtttcagatgcatggcttggtggaaaaaaagagaaaggtttttcactcggatacttcgatcgtgaatatattagtcgcgctcctatcgcaacattatctgattcggatggaaaaatcattgcattcacaacattcatgcctgtatatcaaaacggatcattatctgtcgatttaatgcgatattatccagatgcgcctagcggcattatggacgcaattttcatccacttattccagtgggcaaaagaaaatgaataccactcctttaatatcggtatggcaccactttcaaatgttggtttatccacacagtctttctggtctgaacgagtggctgctgcaatctttaataacgttcgttatacgtatagtttcagcggattacgacattttaaagaaaaatataaaccagcatggagcggtaaatatttagcatttaggaagaatcattctttaccaattacaatgctctctgtaacaaaattaataggaaaaagaaaaaacagctaaattcttagctgttttttcttttttgaacttgtacaataaattctttttcatacttcttaccatttatatagaaattcccccacattttatacgtgccctcggcaggaaatgtaattcggtattgtaattgttcatccgtatctacaggcatagcgtataaaaaattctccttcgtttcatccactatatagagtgactctacttctcctctctctgaatgcaatttcaatttttcaccctttttcgcttgaaactgaaatgttaacgtaactggttcattcggatgtaatgcgccaaataaaagagaaacttcatactctcctattttttttgtaagtacactgtcgattggaaatttcacttttttcttattgttctcctctttcgttctaccaaaattcttcctagcgaatgactctacggacttatttttatcttcgtataaaaatattgtatattcttcgtctttcgctattttggaagataacttatatgacccgttccctgcaaatgtgggtttaatttgttgtatgttttttaactgtccatctacaatcactgcccgcatttgatcatttacaccacgaatttcattattcttgttgtttaacaactgaaatacaatatctactttctcatttccctttccatttgaaacatcccactttacttcctgaacatctcctacagtctcttcgttttcttgatatttttttatgtaaaatcctcctgccacaataagtactaacgcaataagcccgatgacaagatttttcaaaacatcacctaccatttttattgtctctattcatacaaaacttcttaagatatatattctagattatgatttatgaaatcctcctattttgcacatattacaaataataaaaagattttaattgaaaggattcgtagtgtataatgcaaatgatattgatttctatcaatacattataaggaggacttttttatgagtgtacatatcgaagcaaaacaaggcgaaatcgctgaatctattctattacctggtgatccattacgtgcaaaatatatcgctgaaacatttctagaggacgttacttgctataataatgtgcgtggtatgttaggttttactggaacttataaaggaaaacgtgtatctgttcaaggtacaggtatgggtgttccttctatttctatttatgtaaacgaattaatccaaagctacggagttaaaaatttaattcgcgttggaacttgcggtgcaattcaaaaagatgtaaaagttcgtgatgttattatcgcaatgacggcttgtactgattctaatatgaaccgtttaacattcccaggatttgattttgcaccagctgcaaactttgaccttttaaagaaagcttatgatgctggaactgaaaaaggattacacgttcgtgtcggtaacgttttaacagcagatgtgttttatcgtgaaagcatggacatggttaaaaaacttggagattacggtgtattagcagtagaaatggaaacaactgctctttacacattagcagcgaaatacggtgtaaatgcattatctgtattaacagttagcgatcacatcttcactggcgaagaaacaacatctgaagagcgtcaaactacatttaacgaaatgattgaaatcgctttagatgcagcaattcaacaataatacactaaagaacttgtcatacgtctggcgagttctttttatgtgactttttataaataactactttataaagagacagatttctcccctctactttcttgtaacgtttgttataataaagtgaaactttaatcagtggaggttttttccatcccccactgattattagttgaaccaatcggattttacgggcaattgttttcccacttaactcccttgtattcgccgaattttgaagtgggagtcttattgcccgttaaagcgggataaagaaatcatttacagtatttctcataagaggtgacgtagtgaaaaacagaagtatcgtctttaaactatttttattaacatccactttatttacaatcatattcctactttttttcctaggacaatctctatttttagagaaattttatattaataagaaagtaaaaacagtccaaactgcttttgaaaaattcgtagataattatgataaaagtgataaaaattatgagcaggttagaaaactaaaacaagaatttcatgataaaacaaatgccgatatgcagtttttggactctaacggtattattaaaagtgataacaattactatatcgatgtatttaatcccaacaataataaacagtattccattccactcaataatcttttaacaccagaagaatataataaattcgaaaatttaggtttaaaaaaagatgtaataatcaatgttgatggagtcgtacaagagaataatataatcacaccacaaaaattagggacgaattataatcaatggcagaacgaacatttctattcggattttcagtcaattaatggtaacccttctaagaacagacttgcaagccgatacaaatctacaactcgaatcgtctttacaggtgttataactaagttacagctcccatccaaagctgaggttcgtcttgcaaatgatattgaaacattacaagccgttcaatattttgcagatatgattagagagggaacttctaactcgaaccaattaagtactttcatattagatggcggagaaaatataaaaaatagtatctttgtaaaaccgattatagaaaatggaaggattacagaatacgcttttgcgatagcatctttgcagcctgttaatgaagcgatgctcgttttaaaagattattatgtctatgccttaatcatcgtgtttctcgtaattattttgttatccttctactactcaaaaatcattgttaagccattaattaaaataaatcgtgttacaaaaaaaatggctaattttgatttcagcgagaaattacctgttacagctgacgatgaaattggcgggctttctggcagtatcaatacattatctgtaaatttaaaagatcgaatcgatcgattaaatgttgctaatacaaagttacaacaagatattgaacgtgaacgtcaattagaaaaaacaagaaaagaattcatttctggcgtatcacacgaattaaaaacaccgctaagtgtaattagaagttttgcagaaggaattaaagatggtgttagtaaggatacttcgtattatactgatgttattttagaagaaacagaaaatatgaacaggctgattgttgaaatgttagaattagcaaagttggaatctggtacttacaaactagatatgacgacgttctcaatcggtgaattaacgcaacaagtctacacaaaattattatttagcatggaagaaaaacatttacaagtgaacatcgatgcagacccttctatacttgttaaagcaaatcgcagtcgcattgaacaagtagttgtgaacttactaagtaatgcaatccgttatacgccagagggagaaaaaatacaagtctccattatagaagcagaagataccgtaaaagtcgaaatcgagaatacaggaaaccctatccctgaagaaagtcttgaaaaaatttgggatcgcttctatcgtctagatgcatcacgtagccgtcacaccggaggtaccggtctcggattatctattgtaaaaaacatcttagacctccatcatgccgagtatggtgtgtataatacgactaacagtgttgtattctatttcaatttacaaaaagtaaaagaagtcaaataatttgtcttaatttcactaggagttcacatgaaattcacactctccctttatagtaagaaacaagttaatcctttcctttacacatataaaagaggagagtgcgtgaaatgaaacaagcaggacaacctattcaaaatgaaaaacaattagaaactatcaaaaatatacttttacaatcttcgaaacgtgatggcttattattcgtattagctgtaaattctggcttaaaagtaagtgaaatcttacaattaaaagttagtgatgtaatcgatgaaaatgaaaatgttcgccattccattttattttacaatgaaaaagtgaagaaacataaatggtttgctgtaaatgaagacttacagcacgcaatcgaagactacatgaaagaacgtaaaacttggaaacgtaatgaaccattgttaaaatctcaaaaaggaacaaaatctattacgagacaacatgcatggtacattttaaacaaagccgcaaaagaagttggattagaagggattagctcacatacacttcgaaaaacttggggttattgtgcatacaaatcaggtgttgatattgcgtttttacaacacttctttgatcacagtactccatcaaaaactttaaagtatatcggtattgcttaataactcttatacataaaaaaggttaccattttaaaatttggtaaccttttttatatttcgtattctcttttcttgtctctcctatactgtagtggtactctaataataagggggagaaattatgaacacacttacaattgaattaccaaaagaaacggctgaaaaacttgatttattaaaacaagcttatgaaaagaagacaggtgcttctatctctgagagcactctcgttcaaacacttatctcaaaagaatttatccaagcgataactccttttgatttacaacaattcgtcaatggaaaagaacagcattaatcgctgttctttttttatctctatttaaaatatataaagttttttatatatttttagaaaaaccattgacaatgataatgataaccattatcatttattgtgaagccaacaattgatgaatcaaccaaacgctcagtaacattgttacccctctttttcatatagaaaggcactgtacattccccctgtttgtacagtgcctttcttgtttattatcattcaaaaaaatttaattgctccggcttcggctcaccatatgtaatattcatcattttcataagctgtttcgcattatctgctgcatccccacctgaattgttgttaaacagtacgtatatatcctttgttttcttttttaattgctctagtcgttcaacccattcttccagttctttattgttgtagcgatataaacagcgaaccgctctccaattttcccctttatcaagccaaccatgaacatttcgaccgtgaaaacgtattaatgccatgtctgaattcgtaacctctaacacgagtggcacagaacctatcccagcctgtggttcatcacaaattgtatgaatccatttctcctgttctagaaactgtaacgtcttatctctcatttctggataaaaccatgtttgatttcgaaattctattgcacatggtaaaccttccattttttctttcgtatatcgaagaaaatctacatttttctttttgcaatcaaaccatggtggatattgaaataaaattgtttttaatttatcagcttctattaaaggaagaatagactgtttatacacatcaaacatctcatcgaacgtagaaaaaggaatttcacctttcatatgtcccgtcattccttgatacgcttttacgacaaaagaaaaatctttcggcgtttccattgcccattttatataatttcgtgcaggttgcatcgcgtaaaatgaactatccacttccacaataggaaaatactcgctatatgttcgtaatttatttctattttcatagggatttatgtataaagaatcatgatctccccatcctgtcactccaataaacagcacatatacccctcccttttaacttcatcttcaattcactttccaaacactttgcatcatgtagccttttctttaagagtatccttataaaaatatgatatactatatggaagaatttttaaaatgaggggttatttatttatgcttccaaacgatgctactgtatctcatgaaaaacgaattgaagaactagaaaataaagtacgtttttatgaagaacttgtgaatcaattaccacatcatttcacatacaaaaatccacatattggtttacgaataaagaaaactagaacgactcattccattcaagaaataccaaaagagaataaagaggctcattttcaacttacttgtgattcattatttttatttgaacaacttgaaaaacactttgtacatatttttgatgccttttcacatcatgtaacctttatcgatagtaaagggaatattactttatgtaatcaagttgctgcagatgatttcggtataatacgaaatcatattatcggaaaaccgattcaacaattactaaacttgccggaagaaaaaattaaagcaattgaaacattaaaaacgggaacagaaatatataatgaagaagttttagacaaaaactatggcattataaataaccgaattattcgcgattataacggggagatttttagagttattagtgtctttcattatttaaatacagaacgtgatgcagagaagttttcgttagcagggcgaatcgcagctggaattgcacacgaagtacgaaatcctcttacaacagtacgcggatacttacaatttttacaagaaagcatttctccatcaaataaagagttatttaaaaacttgcttatccctgaattagatcgtgcaaataatattattacaaaatttttagccatttcaaaaacacgggaatttacaagagaaccgtttcccatcaatacatttttacgtgactatattcaacagttactagctagtgaagtttccttgcataatatttcaattgattataacttctctaatgaattagatgatattttagtcaatattgatcgacatgaacttgttcaagtgtttttaaatctatttcaaaatgccgtcgatgctcaaggcgacaaacctctttctattcaaattactagttatcgccttaataacttcattcggattactttcacagataatggaattggtattcctccagctattcaagaatatatctttgatccattcttctcaacgaaggattcgggaacaggactaggcttgtcagtaacaaaaaaaatcatccaaaatcataacggcacattaaaaatgactagtaatgaagatggtacaactttcactatttcaattccaatcttacctaaaacaacccttgaaaaattaaatcaatgtaaataaaggactaatccacgaactacatgccaattgttaaacactcccaacaattagcatgtagttttttatgttgcacttttcttctttacattatataaacctttctctatatcttacttatttctttcgtaggtgggccaatttcttattttttttagaaatggtaatttgtccatcacgaatttagtataaatttcattttaatatatagtaatgactgatgattctatgaaagaaaagaatgaaaagatgaacaataaaaataaaggaaaagtattttatggtaatgattgttgcgaagtaagagcatgtaaccatattaacatccctaagtcagaacttacagaatttgttagacttcttcaagctcttggtcaagctattctagttcaatatggatttggttgcctaggcggaggaactacggggactactggtgctcaagggcctcaaggcgctcaaggacctcaaggcgctcaaggacctgcgggcgatacaactgcgacactatctgtcttccgaatttactaaccacaatttccgaaaatattttgggaggactaagcacatttataagtaatagatgtgattttgattgtctattaaatctctcttttaataaaaaggagcacttgtttgggaggataagtgctccttctttacgtttctttacctcaaatttactctatcttaatcctcattttgtatgataaataatgaagtcaaagatatgaaagagggatgaaaaatgagagttatgtcaccgatacgcatttggattgctcttatggtatgcattattttatgtgtaggattttttttaactctaaaatattccactatttcaaaagcagatagaaaaactgttccatacaaaattttgtatacgaaacaaagcaacatcccttattccaatgcaacaaaaaatgaaaagaaagttataacgggaatgcttattacgaaagcttctagttccgaagcgttacttcaaattgctgaaacgattaaagatcagtatacaaataaaaaaatcgatgaaattacactttctatccacaatgaaaataatggtaattacgaagaagaattaccttacgaacctattagtaaaggaaaaataattgtcacatacgattctcaatcctttggcaatacgaacattatacttaacgagtagtaactagtacggagaagggataatttcaatcgtttaaagtttcattttgtttttcatacaaaaaagaggcgaatttcattattcgcctctttcttttaccaaaatgaaggaatccattctttcactttatcaatccactcttgttgctctttttttctttgttgttcctcttctttccttctcttctcttcttcttttcttcgtttttcctcttctattgtagtcaattgttttttataatcagcctcagatatgagcgataactgaaatgctttttgagctggatttgcgttcgcttttttcataatatcccggaacattgtcgtcgtaatttgactaccacccggaacataatgatcgctatctgttttatcatatcctacccaaatcgcacctaccaaatctggtgtgtatccaacaaaccatgaatcctttgcgccggtgcttgggccatttacaatttgagtagttcctgtcttaccggccgtatcaacattattaactttcgccttttcacccgttcccttttcgacaacgccttttaataaatatgtcatcttttgagaaattttctcgcttgtcactcgtgtctctttcttataccactttccaatcgtttcaccttccgcattttgtatctctctaatcgcatgagcttccacttgaacaccatcatttgcaaatgtactatacgcttgagccattacaaatggggatgttcctacatgcataccgcctaaagcgattggatacgtacgatcttctggcactaatggaataccaaatcgctctaaagatttcaatcctttatctaatccaatctgttccaatagccaaacagccgaaacattgtacgactttgccacagcttcatacattgtcacatcaccgtgaaaagtatgatcgctattttgtggtttatattctttaatattaaatggttcatcctttaatatatcgtatacttcatacccttgttctaaagcgggtacatatacagctagaggctttaatgttgaacctggctgtctttttaattgcgtagcatgattaaattgtaaaaactgatatggtcctctacccccaactaaagctggaacaccgcctgttttgggatttataaggactacacctgtttgcataagttgatctgagccactatctttgaaataactatcattattcacaacatcttctacagcttgttgttttttcggatcaagctcagtataaatacgataaccacctgctaaaatttcattttgtgttaattcgtatttgtccatcgcttctctaacaatatagtctacatattgagaatattttcccttgtatttatcatccacaccacgttttaatacaagaccgctctctttttctttattatactgttcgtcagaaatatacccttgctctttcattaagcttaatacgacattacgtctttcaattgacttgttaaagtttttataaggtgaatatgcagatggtgctttaattaagcctgcaatcgttgcagcttctgaaattgataaatcttttacctctttatcaaaataagatttagctgccctctttatcccccaagcaccttccccaaaataaatttgattcatatacatttcaataatttcatcttttgtataagtacgttctattttttttgttaaaaagtattcctttattttacgagaaaatgtacgatcttgtgtcagaaatacattcttcgcaagctgctgtgtaattgtacttcccccagctacaacttctcctgctgtaatatttttaaaaaccgcacttataattccactataataaataccatgatggttaaaaaattccttatcttctactgcaacaattgcctgaaccataatatcaggaatatcttttcttttaacgccttctgttttcgaagaagctaatttagttgcgacctcattatttgcatcataaattaaagtcggttgtggaacagcttgttttagttcagatatgtcttgaatggaaattattatatttacagcaataaatagagtaacgaatacacttcccaatacaattaatgaattacgaagtttcttcctcttattgaaccactcaagcatttttttaaaatgagtgttcttcaatttcattcgttcacttccttcatttatttacactcttctttttaaaaggaagaatataccgccttttaaatttattataataacgtagtcattcctatagtgtaaagcttttcttttacattcatactttttgcaagaaaaggacattctacaagtaagatattcactattggatattaatattattaatagaacaacgagagttatgttaagtttttgtaaacttttcgataaaatgttttaaaaaacgacagttttttgttagaattgattagccaatatattttacatatattacttttgtgggggtaacaataatggtctttaaatcaaaaaaagataaattttctgaaatgttaatgaatgtttccgaaaatttaaaagaaggcgcgcagtttttcgtggagtataaaattaaaaatgctagcgatttaaaagagttttctatgcgcatgaaagagtatgagtcaaaaggtgactcatttattcacgaaatcattatggagttaaacaaagcgtttatcactccgattgaacgtgaggacatcctacaacttgcaatgagtatggatgatgtattagacggattagatcacagtgctggtctgttcgaaatgtattctattacagaagcagatgaatacatgattaaattcgtagaagcaattaatcaatgtgcgattgagattgcaaactctgttgaattaatgtctaacaaaaaattagtcgacattcgtacaaatgcgattaagattaaggattatgaatcacagtgtgatgatattcgccgtcatgcgattaagaacttattctctcgtgaaaaagatccgattaagattattcaatttaaagagatttacgaagagcttgaagaagtagctgatagctgtcaaagcgttgcaaacgtattagaaacaattattatgaagaacgcgtaaggagtttgatcatggatacactcttgatactgaccgttttagtagtcatttgcgctttagcttttgactttatcaatggatttcacgatacagcaaacgctattgcaacggctgtttcaacgaaagctctaaagcctagacatgccattattatggcggctattatgaactttttgggcgcaatgacatttacaggtgtagcaaaaacgattacaaaagatatcgttgatccattcgccttacaaaatggttctcttgtaattttagctgctttgcttgcggcaatagcttggaacttaattacttggtactacggtattccaagtagttcttcgcatgcaattatcggctcaatcgcaggtgcagcaattgcggccgctgggattagctcgctaaatcttaaaggatttattaaaattattgaagctttaatcatttcaccgattatcgctttcgttattggttataccgtatacagtatttttaaagtagtatttaaaaactttaacttaacaaaaacgaataagaacttccgtatattccagattttcactgcagcattacaagcctacacacacggtacgaatgatgcacaaaaagcaatgggaatcattacgatggctcttatggctaataactatcatacttctagcgatatcccgttctgggtacaattatcttgtgctatcgcaatggggcttggtacttctgtcggcggatggaaaattattaaaactgtcggtggacaaattatgaaaattcgtcctgtaaatggtgtagctgccgatttatcatcatcacttgttattttcggtgcaacattcattcacttaccggttagtacgacgcacgttatctcttcttctattttaggggttggtgcttctcaccgtgtgaaaggggtaaaatggggaactgcaaaacgcatgttaattacatgggttattacacttcctatttcagcttctttagctgctctgttttactacctattacattttgttttctaatcaaaagtcgtcttccttatttttctaggaagacgacttttttgtgaacaagcctatttctctttaaaaagcgtgtataataattggtggataagttatttagaggagttggcaattttggaatacatcatgttacttttcatcggactaatcgccggaacagtcggcagcctagttgggcttggaggcggaattattattgttccgttattaattggattacacagtttatcaccacaacttgcagtagggacttctatggtaacagtcgttttcacaggactatcttccacccttacttacatgaagcataagcgagtagattataaaagtggacttattttatttatcggaagcggccctggtggtattatcggatcatgggcaaataaatttttaaaccaagacacattttctttatactttgggattttccttatattcgtctcaattctacttatgcttcgagacaaattaaaacctctttccctctcaaatacgtctgtaattaagcgttcttttacagataatgatggaaatactgtacactaccaattcccaccgtttcttgctatctttatcgcctttatagttgggtttatatctggattatttggaattggtggcggtgccttacttgttccagcaatgatgcttctttttgcattcccagcacatattgcagtagcaacttcaatgttcatcgtatttctatcagcaattgtaagttctgcaactcacatctcacttggaaatgtcagctggatttatgcattaatcctgattccgggtgcatggattggcggaaaaatcggggcttacattaatacaaaactaagtggtaacgccgtaattaatttattacgtattacgttgattattcttggaactagattaatcattatttcccttttataacgtattctttttagaatgcgtttttcttatacacatgaatataaaaatcctccgaggagaacaaataaaattaagcaaacacataataacatataatttgaaatatgtaatttcttcaagttgaccactcctataactgcgactgttatctttatgatagcgaaaaaatagttcacttgcagttacagagtgctaacaatgcaaaatcaattattacaaattttatccttatatttcatttctttgtatattctatcgatttaataaaaaaagatgtcatattgacatcttttttaatgaagaagtgaccaccccatgaagtcttcatgtacttggcacgccctcttatcgtttcgatcatataattcagcatagctatctgtttcttcatcataagccatcgtataaataatttggccgtctacttcaacggataaaacgactccacctttcatctcttctacatgaatgatagcattcgccggaattctcatatccgtcattctcatcgcatctaacaatatactaaaccccctacagcgtattcattgctagtactattacacactaaatagtatactactgtaatagcatacatttcgtcaatgaaattgctgttgaaatagcatattgtctatatacatatacgctaaaatagaagaaatagaaacatattaatggggggctaacattgattctacacaaaggagatgtactattccgtcaaggcgaggacggtcctttatactttataaaaacaggcttattaaaagtagttcggctagaagaagacggaacaccatttttattcaacattatcgttccaggtgaaacgatacctcatcattctttaatttcaccgaaagaatatcacggtacagctatcgctttaataaaaacagaagtggaaccgatcactagtagtgaatggtacgagagacttcaagcaaatcccgaatcgtatgctaacatcgctatgcaattgcaatctaaattaagaatgatgcaacaacgaattgatcaattgacaaccgtctctccgaaagaacgtcttcatcgtttacaagaatggttcaccctatatttaggtgacattcctatatatgaaatattaacacaaaccgaaattggtcaactgataggtatacgtcgtgaaacagtaaaccgtttattacgagaacaaataaaaaacgaggtaaaataaatacctcgtttttttgcttattgtaagcttgttgctgggccgaaaaattcataatgaatatgctcttgtttcacacctaaatcagttagtgcagcatttatatgcttcataaatgctactggaccacagaaataaaactctgcttcagttgtcggaataatagtttttaaccattcactttcaatgaaaccttctttatcaaagttcttcatttctaaatctttttcagtcggtgcagaataacaagtatatgctttaacttgttcatattcattttctactgccttaacgtcttctttcattgcatgtgtattactatttattgctgcatgaacaaaatatacattacgttttgaatcttgctcaattaacgtatttaacatactcatcatcggtgtaatccctactccaccactaattagtacaactggtaatgttgaatccatatttaacacgaaatctcccgctggtgcacttactggtaaaacatctccttcttttacatgttcatgtaagtaattagacactttaccgtctggtgtatctacacctttttctttttttacactaatacgataatattctttcccaggagcatcggataaactgtattgacgattatgtgtatatgtctcaccttcaatattgatttgaaccgttacatattgacctgggatgaatgaagaaactttccctccatcttcaggtttcaaataaaatgacgtaataacatcgctttccttcacttttttaacaatcacaaagttgcggaagtctttccatccaccttctttatgtgcagcttcttcatacatctctgcttcaatgctaatgaatgcatcagcaatgacaccatatgcttctccccatgcgtttaaaacttcatcaggtgcacctgcgacctctttaatggcacgcagtaaacatgtacctacaatcgggtaatgctctgctttaatacctaaacttctatgcttatgaccaatttgttttacaactggaataatagcttctaaattatcaatgtacgttgcagctgcataaacagcattcgctaacgcttgttgttgtcttccctttttctgatttgtatggttgaaaatattcaataactccggatgttccgaaaataaaatttcgtaaaatctcgttgtaatttcaacgcctttttcttgtaataatggtactgttgactttacgatttcaattgtttttgcacttaacattgtatcccactcctctatttccttaactgtttttagtttaactgaatcttataatgcagattgtgattttaatcactattaacacggtgtttttgtgaataatatatgaacattgtatttacaaaagaaaataagctaactagaattctagctagcttattattttgtttgtatagcttgttcaattacttttatatctttcccatcgccaaactccgtatatccccagatattcgtttcacctctatatttatttacgataatatccaagtcatgatatacacggtgggcatacactacatactcaatattttgaagttccacacctttttttacaatttcatagcttctatttacatcacgttttattttttcattctttatttctgtatgtatattttttaacgatgattcttgttgttgaaaccattgcttaaattgattcaaatccccgtctgtataattctctgctttaccgtaatttaagaaattattatagctttcatgtgtcattcgaataaaatttagcacttttgtctcttcttgcacatcttctatttgagctattgtatttacctcagcaggcttattcgcataatgtaacagcactttcataagactatagcttgcaatgatcatcacgataataatcccgaatacacttaacaatttcttcatatacagaactccttctctactaaaaatattacaatgtatgactatacttgtaactttctctcgtagaaatataattcctgtataaattcttcctatcatttcgacaatatttttctatacatttctcgttggcaaatgttcttgtaaaacaatatatccttcataagctgtgtaaccgagtatagccattaatccgatataacaagcaaatactgtccatttcgttttcgcatccactttataatagttttcttgttgttccttttctgttttccattcatttaattttctttctgacgcttcaaatgcttcccttatgtgaattgtatactcatctttttcatcttcatatggaacataatctaacggttcgaacttcggtaaaagatactctaacacttccattttttgaagttcacctatttgtaactctttttcccgttctctttgtcttaatgcattcatctcatgatgcatcacgtatatagtccgatgtacagcacccgtttcttttaattcctcttcaagcctagtaacatattctttcatcccatcaattttatgccctaattccttaatcggctcatctctctttattactctatataactccatacaaccgataataacaataaatcctcccaaaatacttttaaagtaaattgaatagccaagtaataaaataaggcctgccccccaaattttagtactgacaactgaaataattcgcccaccatctagcggcgaaacgggaattaaattaaagaaattaatcatacttccaagcaaaataacaagcgcccaaaatggctctttcgtcattatataaagcggtatcgctggtaaaaatgacagaagtccgaaaagcggacccatataggcaatgtaagcttcatctttcgcatttttcggcatctctttcattccaataagggcccccataaatggaataaagattgctggcgatgttgggatcccctttcttttcgcagcccataaatggcccatttcatgaacaaacaacaaataaatgagcgccactccaaatttccaaccatatagaactgcgtatgcgccaagcgatagaaacatactaaataccgttgaaaactttgctaatttaaaaattgcaaatacccactttaacttagacagtaaaaatagacctatcgcaacaataattccccataatccttttttattatttttcatattcctctcctttatctctcattaatgaatcatattcattcattaaagcttgttcttttctctattatgacatatttttttctattgttagaaataatgtttatataatccattttcagccaaaaatataaataaaaggaggtgtacaaaaatgaatttacaatctcttataataggtgctctatcgtttttagcttcaactcttattttttataccgttagttacgtattattattagatttgttgcccaatcacgtatttattgcccttgtcatcctttccgctcttatgatttcttttcttattacacgaaaatcaatgaatgagccatctgcaaaagcaaagtaatagagaggggtgctttcccctctctattatcatttcctaggaaaggtcatatagatttgacgagtttatattcattccaatccgtaagggctaattaaagtctcactttatctttgaaaattcattttttcaccataatctttaacaatctgaattatattttgaaacacacctattttttcttttttactgtttaatattttcaaatcataactttcgtaatatgtttctaatgattttaattgtgattctgaagcgctttttatcggaacagtagcatgtaattcatattgcttatacccttcctttactttttcacctaaaatcatttcactctcttttgctccaattaatttttgaactttttctggaaaattgagttgcaaataatattcttgctccttcactaacttattgtatagtgattgtgaaatcgtataccgtaccgtataattcacgttttgatcgcctgttttaatatgaaacgcggtaatctgcaaatctttttttgttacttccgttaaagggcttacctgcatctcatcttctttttgttctgagacatttggaaatatatccaaaagcttttccgtatctttttcattcaacatatacatagctttcttatattgcacccatcctcgtctatcttctccccttaaccatgcataataagtttcttttttcccatctctactaatttgtatttcatattcaggttcaccgaagcttcctgttatttcttgtttctcagctttattcaaaatgtctattactaacttcgcttctgattcctgcaactttttctctttatgttttttttgtaaaacggttacccctattgtttctttcacttcattcaccgtctcttctactttttttgtttcttttttcggttcaacttgaccacaagctgctagtaacataacaaacaacaacaccaatacatatttccctttcaaattaatcctcctcttacgataagaaatccttataatcttcatacataaaacaaaaacgtgacatcctattaaatacgctatactaatcattgaaaggaggtctttatcatgtccattaattttcatgatgaaaataataagtacacatatgcaacaagaaacgctcatatttcttgggctgaaatggtaaaaaacattacagaaatacaaaacaagcaaataattgatatcggctgtggtggtgggatttatacgaaagaattcgctcttatgggagccaataatgttgtgggacttgatttttcaaaagaaatattacaagctgcaaaagaaaattgtaacaacttttcaaacatttcattcatccacggtgatgcacataatatcccataccctaatgaaacattcgacatagttatttcgcgtgcagttattcatcatttacaagacattcctacatttttacgtgaagcttctcgtatattaaataaaaacggtgtacttattttacaagatcgaacaattgaagattgtacaattccaggaagtcccgaacacattcgcggatattttttctctctatttccaaaacttattgaaatagagtcaaaaagacgtccaaaaaccaacactatacagacagaattacaaaaacattctcttcatgtacttcccacacaaacacaatgggaaatacgaaaaatacatgattctgtagaaacattattgcaagatttatctcctcgaacaggtcgatccattctatatgagttaacagatgatgaactttctcaacttctacaacatatacagaccgcattacaaaacgtctctcctattattgaaagagatcgatggacaatttggagcgccatgaagttgtaaggaaggaagcctcacaaaataatgtgaggcttcctttctttcataatctaattttgcaacactcttgatatcctccacttctggcctgtgcacttccacacttcggacatactaaatatctagactgatttgtcaacaaactacctttttgaaagagtaaaacttctgcttgtttaaacgaacgcgaataatataaccacataaaaccaattatagcaataatgccaaataatactcccatcgcaagcatttcagtcacctcttttggtttgttctttccagcaagtggattgttgtattattctctataaattcaaacaatcccttcttcactcctataaatatcaattttctctataaaatttacaattctccgcaaatttccactcccattttacaattcatcatttcctttacaacaacgaatatcactttcgatatttccgtatataaatatatctttcaaaaaacatattgactttctaaaaaaaacatgcaacaatactgtcagaatacttgaataaaaattcattgacgagaacgagtacgttatagaactgttccccagagagttggcgatttgctgaaagccaacgttcagcgcgtaaccgaaaatcatctccgagaagtagaaccgaatgttacagtaagttcttaccggccgtcccccgttacaaggaacacgtatcatgttgtacgttgcaaagccgtatacatatagatttatttctacatgtgtaaattagggtggtatcgcgggtaaatataactcgtccctttctttagggacgagttttttgtgttcttacaaatgaatttaaaaaaggaggaaaaacaatgaacactgtatcaaaaaaacatatttttttcacgggtcttatgctattttctttattttttggggcaggtaatttaattttccctcccatgcttggccaaaatgcaggtgaaaacttttggccagcaatgattggatttttactaacaggagttggcttaccactactaactgttatcgcaatttctctatctggaaatggaatgcagcaacttgcaagtcatgttcatccattattcggaattttctttacagtaattgtatacattgctatcggtccatctatgggcatcccacgtgttgcaaatgtcgcttatgaaatgggtgttagttctttcttaccagaaacaatccgctctagcagcctagtgctatttgtatatacaatcatcttctttactatcgtattttggctgagtttgaatccatctaaacttgttgatcgtattggaaatgtattaacacctattttattactctctattttcttattgtttgttaaaagtgtatttacaccacttgggcaatcaggaccagcaatgcaagagtatcaaacttctccaatcttcaaaggctttatggaaggctacttaacaatggacactatttcagcacttgcattcggaattatcgttgtaaatgcaattcgctctaaaggtgtgaatgatcgtaagtccattgccatcgccacagcaaaagcagggcttattgcctctacagggctcgtacttgtatacggtgcactcggctggcttggggcaactagcgtctcgctcggatatgcaaaaaatggcggacagctacttactgttatcgtacaacaattattcggtccatacggtttgctcctattatctcttatcgttacactcgcttgtttaacgacatgcgttggactcgtatctgcgtgcagccaatatttttcaacattattgactacattttcatacaaaacgttcgcgagtatcatttgcgcattaggattactagttgccaacttaggtttaacgaaaattatcgcaatctctgttccaattctacttgttgtgtatccaattgcgattgtactcgtactactatcattgcttcataaatacttcggtggatatcgctctgtttatgtaggtgctttaattggagcagctgtagtgagcgtatttgatggattaaaacaaggtggtatttcagtttcatttatcacaccatattttgaatttatccctttatataatgaaggaatcggttggctaataccagcattagcaggagctcttattggtcttgcaatggctaagttaagcggtacgaaaaaagttccattagtaaccgaatctcacgaagtaaaagcctcctaaaaaaactcccaaaagggagtttttttacatttgatacgcagtatgattaaaactgcttattttataagccttcgtataatattcaatattcgtatcaactgtttctaccttgacaacatcatagtgctcttcttgctttactaaaaataaatagtattcctctgttgcctcaataatcgcaattttatctgtttcaacattatattgttcacaaagcgcttgtaatgcgttcacataatcccctaattttttagacttatccattccgaatatagtttgaactaacatatacattctcccctttatatgtactgttaacacctcaatgataacgcttacattatttatcgtcaataaaaacattcaattgttttaacaccaaatctatattgtatcgagccaataatcagcgaggaattccccgccaattaaagtttcactttatcccgcattaactgcccgtaaaagcccgattggtgagggctgataatcagtgggagaggaacaacctcccactgattaaagtttcactttatcacttcgttaattgatgcctaaatgcataaataaccgcctgagtacggtcacttacattcaatttatttaatatattactcacatgtgtctttaccgttttcagtgcaataaataactcgtccgcaatctcttgattactttttccctctgcaattaataacaaaatctcaaactctctttccgttaaatcatcatgcaaaggttgctctttcttttgacgcatacgggacatcattttcccggtaactttcggctctaatactgtttctccatcataagtagctcgtacagcatcagcaatatcacttgctcttgatgtttttaataagtagctggtcgccccagcctcaataacaggatacaatttttcgtcatctaaaaagcttgttacaactacaatttttgcttctggccattcttgaataatagcgcgtgttgcttcgacaccgtccatctcatccataacaaggtccattaaaataatatccggccttaattgcaatgctaattgtgatccttttcttccattctcagcttcccctactacttcaatatctggctgtgtagataaatatgccgatacacccatacgaaccatttcatgatcatcgacaagcaatacttttatcatacttctccccctctctcaatcataatcggtacttttacttctatttgtgtacctttggccgggaaactaagtaccttaagtgtcccaccaatttcatgaacacgctcttgcatcgatcttaggccatatgaaccagccttattaacccctacttcaaacccaacgccgtcatcaatgatttttaaaatcgcatattgatcaatttttcgaaggcgcacttctgttttctttgccttcgcgtgtcgcaacgtgtttgatagcgcctcttgcacaatacggaataaatgatcttctacacctttttttaattctattggctcaataagccattcaattttcatatgttgttttcgcgataattccgttaataattcctctataccttctgtcagtttcttaccttccaattgtacaggacgtaaatgaaggagcaatgctctcatttctgattgagcatttacaaccatattttcaacaagttgcaattgtttttttgtcacatctggaaattcagttatttgttcattaatcgctgacatcatcatcgacattgcgaaaagctgctgacttactgaatcatgcaactcccttgctaaacgatgcctttcttgagaaatcgcttcttgtctcatctcttcattccaatgagctcgttcattcgttactttttgaaagagtccagcttgctcctctaatcgacgagccagaacgattacttttcgttccacttcatgaaattcatcatctgcagtaaacgaaacatcgctcggaaaattccctcgctctacttcaaatagaaacgtatttaatccttgtatacgctgctctatatagtaaccgattgcatatcctacaattcccccgataagtaaacttgtagtcataataaacaagccaattggaacagaagcgatggattccttccataataaatcatacacttgttgctcgcttttccatacatatacaattgtacaaatgagtgcgatactaacagaggacaacatagaataacgaatatacatccacgaaatatttttttgtttcttcattatactttcctcacttccgtgtcgcctacgacaagcgaagaaataattttaatacgtcgaggagcctctttatactgctctgttctaaatgtaacattgcggttaaaccctgtctcttcataacctggcaagagcacacgcccgacaataacagaatgatttaaagaaagttcaatatcatatggcacatataaacgaatattaccaacgacacctcgaataacaattaccgtttccccttctggaatcatagcagttgttaaatctatttccacatcacaagcaccatattgaacattaatatcctcaagttcataaatatgatccatcattcgcacattgcctacaaacatattttttaaatatggttctgtacgatatatttgcttctcttcgtctatcatccctttttctttaatttcaaccttcattgctttttgctgatgcccttgttgaatcaattgataaccaattaaagctaaacaagcaaatacgacaagaacaaatgctgctgatgaaaataagaagaataaaaatacgataccaccaacaaataaaaatacatttccccgtacataacgattctttttacgataatgccttccaaacataagcataataaatgcaaaaatgagaccacctggttcaaaatgtccaagtatcatatcaagaaaaagaccgaacccaaatatgatgaggagcatccccattaattgtgtctttgaaaaatgtttcttcatttcagctccccccttcttgtcacatatacatagaagaaaaggcattgctttccaacaccttttctcctatcactatatcataagcctgttttataatatactactattattttgttaactctttcgttaacgatacatcattcttttctttcatttcacgctcaagttttgcaattttcatatcaaatgtgtcacgctcatgctcttcattcatacgagtttctaagtcacgaatatgatcttcaatctcttcaaatcgtaagaatggattattttcatccattttatgcatcgcagtattcatacgacgatttgcatgtgccatattttcacgtgccattagttccatacgctttgcgtgcatttcttttaatttatttttcatttcagaaagacgacgctctaactcatcaatttgctctacaacacctgcatacatttcttctaatcgagttacttgcccttcataataagctacctcttctaacgcacgttcgtgcaattgtaattcacctgcttcttgagcaatgatagcttgctttgatcttttattaacgaaataacgtgcttgctcaagctcacgagcaaagttagattttaatgttttatgacgctcaattaacttctcaatttttgttatttcacgctcactatcacgtaaatattggtttaacatcgcaattggattttttctttccttctcatctaacacgttatgaaaatcagctaaaattgcatcgcgtacacgtccgaataaagattgtttcattataaatcttcctctcttctactttaattataatttgatttattgttttagtttttcattaatttgttccactcatcttcaaagttgctatatgatttagaactttctggagcagattcaacaactacatctttttcttttttccactcacggtatccgtagtataaaaccactaaagcagcgataccgattaatgctggcgaatgagaaagtgcaatggataaaccgattaaaccaacaataccccaagctaactttccaaaaaatgatttagctcgcacaaatgatttatagctccaatatacaactcctgctccgattgcgaatcctacaataccagcaagactaccaagagcaattaaagccaaaataccggctgcgataaacgctagaaattgtttcatcttgtgcttgcctcccttcgatttgatactcttatcttaactattttttcatctttccataacgagcttaagaaccgtttttaactcagacttaagaccgagtcatattcagccctttacgcaaaaaaaaagtgcagagtctattctctgcactttttttaattactaacattcatattaaattaagcagttttatgatactcttttttcttagctactttcgaaaaccttggaaacccaattaaaatagaaacaatcccacatactccaactaaaattggataaaacgcatacggtaacaattcaactggagataacgctgcaaatcctgctgccgttaacatttgggcaccgtacggaattaatccttgcacacaacatgagaaaagatctaatacactcgctgatttacgagggtctatttcatattgatctgcaatattttttgcaagcgggcctgtaaaaataattgaaatcgtattattcgctgtacacatattcgtcatactcactaaaccagcaataccaaattccgctccttttttcgaacgaatattacgtgttaatacattcattaaatattgaataccaccattatattggattaattcaaccataccgccaattaatatagcaagtaatactaactccatcataccgcccattccagtcgttacacttttaaagaaactttctaacgtgtaacttccatctataagaccgataacaccagatagtacagttccaccagttaatacaataagtacattccagccaagtagcgctgtaattagtactcctgcgtacggtaaaatctttatccaatcaaagctatgtgctttaatctgcgtgtcactccctgaagtaactattactaatagtacaattgtaataatagccgctggtaacacaattaaaaagttcgttttaaacttatctttcatttctgttccttgtgaacgaacagctgcgattgttgtatctgaaataaatgataaattatcaccaaacatcgctccgccaacaacagtagccattgcaagcgcaattgagatatcagtttgaccactaatacctacagcaatcggcgctaatgctgcaattgttcccattgaagttcccatcgctaatgaaataaatgcaccaataacaaagattccagctacgataaatcctggcggtaaaatagttaatgctaaattaacagttgagtctactccgcccattcctttagcagtttcagaaaatgcacctgcaagcacaaaaattaataccataatcataatatccggatttcctgcacctttagcgaaccgctctactttcacattaaaactttctttacgattcatcattaaagcgactcctacagcaattgagatcgctacaagtatcggcaatttatagaaatcacctgtaataattccagaaccaataaatagcgccaaaaatatcccaagtggtaataaagctaaaccatttcctctcgtttctttcaaagtatcatctctccctagtttcaacctttttctaatgaataacaaaagacctcttccgatgagaagaggtcttatacatctataagaaacactcttctcatctttcaagcacacgcttgctggatttggcacagcactctgaaatcgagtccgctgccgaggcatcgtagggccagtccctccgcctctctttataagaaggtttcatatttattttttaataataatttctttcctaactttactcgcttacaaaacaaaagtcaattattttttgtatagatttttttggtaattatacaaaaattcgaatacaacaatcattttaacttttctatttcttctttcaacattgaaatccaataaaattcattattttttattgctgctaatatccatttcgtagtgtaccaagctaactcatactcttccttcgtgacatcgacacttttataagcatcctctagctcctcttcatctaatacatacaccttaccgctaggtaataatactacatctaaatataaatcatcaaaatacggtaaaccacgatcgtctattttatattctttcgccacatcgatataatattgcactaattttttctgatcatctaacatagcggtaatcgcaaagtttttcccttctataaaatattgaacccacgtatactgatccgctgcaatacaaagttcttcaccatcatattctttacaactaggctctctcaccttttttatatccagtattccgagcattccctcttccacttgcttaaccgtataactcttttctattagcctcttccacgaagaaccgtcaccatatttacgtttcattatgtctgctcctcttctatatacagaaaagctcccacatattatgtgagagcttgttcatattataattaagccgcttgacccttttcagaaatctcttttaaataagcttgtcctttttcagcgtcatattgaccttcccacttagacataactacagctgctaaagagtttcctacaacgttaactgctgtacgagccatatctaaaatacggtcaataccagcaatgaacgctaagccttcaggtggaatacctactgtaccaagtgtcgctaataatacaacgaatgatacgcccggtacacctgcgataccttttgatgtaaccattaatacaagcaataatgtaatttgttgtgtaatagataaatcaataccgtacatttgcgctaagaaaatagccgcaattgcttgatataaagttgatccatctaagttaaatgaataacctgtcggaataacgaaagatgtaattgctttcggacaaccgaatttctccattttctccatgatttttggtaaaactgtttctgagcttgctgtagaatacgctaagatcagctcgtcttttaaaatcttaaagaattggaaaatgttaattccaaatattttcgctgtaaggcctaagacaactacgacgaagaagatcattgccccatatacgacaattagtaatttccctaatggaattaatgaagcaagaccaaatgtagaaactgtaacaccaattagtgcaaacacaccaaatggtgcaaatttcataacttggtttgttacgtaaaacattgcgtcagctacaccttggaaaaattgaagaactggtcttcctctttcaccaattgctgctacacctaaaccaaatagtacagagaagaagataatagcaagcatatctccgtcagctaacgacttcataatgttcgttggaacaatatttacaaatgtatctgcaaatgaatgactttgtacttgctctgtcgtatgtgtatatttcgaaatatctgtctttgttaactgctccatatttacgccttttcctggttggaaaatattcgctattaatagaccaacaataattgcaattgttgtaataatttcaaagtaaagaattgtttttccgcctagtcgacctagttttttaacatcgccaacaccagcaaccccaacaacaatacttgctacaacaatcggtacaacaatcattttaattaatcggatgaaaatatcaccaattggttgtaagtacttcacaacagctggattatcaaagaaaatcgccccaaccgcaataccaagcgcaagccctattaatatttgccatgcaagtcctattcttttcatatttgttgtaaccccctcttcgatgtgtcactctatctctcattctatctctataaaactaagaaattaagagtattacatattattcgacaattcactacattttgtccctgttaaaaatcataaatcaaaaatttaaatctgacaacaaaataactttgcccgaacacaaataattttcttgacaaaaagcagacccatgtcagaaaacctaacatgagaacgattcctcactagtgttttattagctttccaagtaatatttcacctcataaaaacgattactttccttcttcattttacagattaattccaaaatatacctttgttacacatatgaataaaatgtatgtactatgacaattacagttgaaaaatgataaattccgacaaaacttagcaattttataaagttttctttacattatgattacaacgatagacactcttcttcttatgatatataacattcatagagaaaggagtcagacaactatgaaaaagaaatttgcagcgtttagtgttttagcagcaggaacgatttttgcttccccgttactttcacccgtatacgctgaaacaaatcaagataaattatctaacattcaatctgaattagaaggcaaacaaagtgacttacaaaataaatcagtcgagaaagaacaaatagaaaaagaaattcaagaattacagaagaaaattgatgaattaactacttctattaataaaaacgaagctgaattaaacgatacaaaaaaagaaattagcaaaactcaacaagtaattgctgacaaaaagaaacatatagaacaattacaaacaaacatagatacacgtcaggaagttattaaacaacgattacaatctatgcaagaaaaacctcgtacaaatatcattacagaggtactaacaaattcttcaaatattgccgatcttgttgataatatgtactccgtaagtttaatattaaacaacgatacagatattgtaaaaaaacaaacatctgatcaaaatgctgtaacgtcagaaaaagaggctgttgagaaaaaagaacaacaactgaaagaatctgagcaaaaactagaacaaaaacagcaagaattacaaaataaccaacaacagcaacaaactcttattaacgatctacatacgaaagtagcaaaagtagattcagagattgaaggattagaagaatccaaaggcattttagaaaatcaacgtcaagctgttcaaaaagcaattgaagaagaaaaacgggccgaagaagctcgccaggcagaagaggctcgcaaacaacaagctactaaatctgctcaagcaactcaagcggccccaacaccacatgatacaaacatcggtggctttatcaaaccagcagctggatcaaaaacttccggatttggtgtacgttctttagataaccataaaggaattgacatcgctgcttcgggaacggttccaattatcgccgctgcagatggcgttgttattcgttcagaattatcatctagttacggaaacgtagtgtatttatctcaccgtataaacggaaaaacatatacgacagtatatgctcatatgaatagccgttctgtatcgaatggacaaactgtaaaacaaggcgatcagcttggatttatgggaaacacgggccaatcatacggacaacatttacacttcgaacttcatcttggagaatggaatgtcggcaagacaaacgcagttgacccatctccttatatcggattataaaaaacctcggtgcctaccgaggttttttatttacacttcacacaatataggcattctacatagactataactaaatgcctatagtttacggggtgatcaatatgaatacgcaattacaacaaaaaatagaagaagctagagagacgtatattggccggatatttacatttggcggctcagtattatttttaatcggttcattccttgcagtcactacagcctataaagcatataatcgtttattacactcatcaacatccacataaaaaaagacgggagatccccgcctttttttatgcaaacattttaaatacacctatcgcatttaaaaatacaattattacagttaccggaataacataacgaagtaagaagaaccaaatgttaaataacgttttccccttcgtttccgtcacttctaattctttcatcaataactctttactcattttatttggtacaaataatgaaatagctagtactcctaacggcagcaatacgttacttaccgaaaagtcaactaaatcaaagaatgttttcccgaatattttcacgtcactcataatcccaaatgataaagctgatggaataccgactgcaaaaataagaataccgattaataatgatgctgacggacgcttcttctcattacctttcgcaacagatgctactacaatttcaagcattgaaattgctgatgttaaagtcgcaaagaagaataaaattaaaaacataataaagaaaaattgaccaaatggtatttttgcaaatactgctggaaggacgataaacagtaatcctggtccttcagttggttttactcctaatgcgaaaatcgctgggaaaattgctaatcctgcaagtactgtaacaaaaacagttaaacttacaatagatgttgctgatttcgctaaatgttcctctttctttaaatacgaactatacgtgaccattactgaggcacctactgttagtgagaagaaagattgtcccatcgcgtataaaatcgtatctgctgtaagctttgaaaaatctggctttaagaagaactctactccagcaaaagcaccatcgagtgttaacgcacgaacaataatcgcaataaataaaataaataatagcggcatcatgtacttacttgccttttctatacctttctctacacctttacttacaacaaaaatcgtacaaagcataaagataaattgtgctccaatcgcacttaatggatttgaaatcgtttcaccgaacaattgtccataatcagctgctccattccagaaacttcctgtcacactataatataaataaagtaaaatccatccacctacaacactataaaaagatagtacactaaaacaagtaacaactcccatacgaccaatccaaggatataatttgctatttggcactagtactttataagctgtaaccgcctctttttgcgtgctacgtccaataacaaactccgctattagaagaggcatacctataaataaagttaatagtaaaaatacaaggaagaatgcgcctcccccgccattacctgcaacatatggaaatttccatatcgcaccaagacctactgcggctccggctgctgcgagtacaaagcctattttcgacgtccattgctgtgtttctttcatcataaattctccttttctgaatatttaaacttttgttaattatacactttcatttcatactcgcacacctcctttagaaaataaaaaagtcccctacacgcaaatatgcatgtagaggacgatatatgtaatgtaaataccgtggtaccacctcaattggattgataaatcccacttgttcaagtacaggaataattccgatactctatccttttaacggcggaacccgggttgcctactacaatgttcaacatacctctcgcaagcccattctgtacattttatcgtaccgggctcccacctaaccccagctctctgaacgcatcaaatatacgtactcttcttgctcatcgatttcatctattgaagttacttgtgattataaattatatttttatatttgtaaagcgcactttatcttttattattttaaaatcttttcctctaattctcgtaaaaaactttctcttttcccctcgttttgcacatatactgatttcaacacttcttggagcaatatatttcgttccctcttttctaactgtaaatcttttaacttcaaccttacttcatataaaaaatctaaatacgattcatatgtctcatcatatttatttgcaatatcatctcgaattttttttgcgagcttcgggctcgctcccccagtagaaactgctatattaagtaaaccacgatgaatcgctgccggaaaatgaacattaccactttctggatttgtaataacatttactaattgattctcagcggcatcttcagcaacttgttcatttaatattgaatcactactcgctgcaacaactaaaaaagcacttttaatatcacttttttcatattctctttgataccaacgaattttcttttcttccacaagttttactaaattcgcatctaattctggacttatcacaactatatccgcaccctgtttgagtaaaggaataattttaaatcctgcaacttttcccccgccaataacaacaacgcgtttctcattaactcgcactgtaagtggatacatactgatctcctttcaataactccgtcgttttctgaattaacatatcttgaaacgcttcattcttccctaaatatggactgatttttatctcttccaattcatattggcgcacttctttctcaatatgtttcataagtaaacctgtaaataacaagtaaggcagtacaacgatgttcttttcttttcgttctataacttcctttaacttctcctcaaattttggctctgcagccgctaaataacaaacttctacttttttaaccttctcttttgtttgaaataaagaagcaatccagtttacatctcttaatacttcaggatcactgctccctcttgcaacgagaagtaacgtcacttcatttttatcttcctgttcgatgccacttccgctatacaccgatttaacaagtgtttccgatacaccaaacggattaccataagtcactttaacattcggatattgattcttaagctttaccaattcacacggaatatctttcttcacatgacctgccgctaataaaaaaacagggatagcaataatctccgtggccccacgctccacacatgtacgaaaaccatcttcaatagaaggattcgctaactctaaaaaacaaacttcttgaatagtcgcttctatacggttcatacacgatgtaataaattgaatcgcctcttctttcgctgtcttcaaacgacttccatgacatatatataagacggctttcattttacaacactccacttacttgataagcattttctgtctgcttctcaaaccaatgaattttttctctaaaacggacaacttctccaattacaatcatgctcggattttgaatttgctcttttttcgcaacatctacaattgtccctaacgttccaacaactgtgcgttgcatagacgtcgtcccctgctcaataatagcagctggcgtacttttatcttttccatgcttcataagttgctcacatatgtagggcaaattactaacccccatatataccgctaaagtctctacacctttcgctaaactctcccatttcacttcttcttcagcaccttctttcctatgcccagtcacaatagcaaaacttgcacttgcatcacggtgcgtcactggaatgcccgcataagcaggagcagctattccagctgaaataccaggaatgatttcaaatggtacaccttgctttgctaatgcttcagcttcttctccccctctaccaaacacaaatggatcgccgcccttaagtctcgttacaacttttccttttttcgcatacttaataagaaacgtgttaattgtctcttgcttcatcgtgtgataattcgggagttttccgcaataaattaaatccgcgtcaggctttgcgtgtgaaagcagctctttattcacaagtcggtcatataaaataacatctgccttctcaatacatttcaaccctttaacagtaattaaatctggatcgccaggacccgctccaacaatataaacctttcccatcatctctcctcatttcttctattaaaatgaaacttccattcgtatataagaatggaagtttttattttttcgtattactgatctctactcatggacaacaaatgccccaccttttcgaatcttctttttttcaaacaaagaaatctcttttacctctggcaacggtaaaaaatgcttttcaagctcaatctccgcaagcttaaatgcctgttcttcactttgagcaacaacaacaatcggaacaatactatttactaacacagcttcaaatcgatataaatccatatcgtccctcctaagacgctattacttcttctagcacgttatttaacgctatttgtaatgtatctacaccaatacgacctacaaaatcataaaatgtttcggctggtaatttattctctttgaaataacttataaatgatgccagtacatcaggtagatcctcgccatctatttttccttttaacttttgattgtaggcaccgccatctaacaatgttccacctacgtatatttcaaacgcttcaacaatgcctttttccttcgtcttcattttcaccccttgtaacccaatgtcagcaatttgacgttgaccacatgaattcgggcagcctaccatatgaattcgaactggaacatcgagtgcaatttgtgtatctaagtattctgcaatttttcgtaatctttctttcgtttctactagtgcaagattacaatattcaataccggtacatgaaaccgcatgaccaataaatgatttcgggctagcagatatcacttcaaacagcggttcactaagtaatccttttacattttccggaggaacgttcggaataatgaagttttgcgagttacatgtacgaatttgtccatttccatattgctttgcgattcttgcaatctcaaacatttcttctgcatgtaaacgacctaccggtacattaaaacctacatattttaatcccttttgtttttggtcttgaacaccataaaaatagcctgcattccatcctttgaatgcactttcccctttactttgtaaagaccctgtatactctattagtttctctttaaatttctctgctccccagtccgcaacaagaaatttcaaccgagctaaatgacgtttttcacgatatccaaaatcacggaatatagtagcaatcgcaatcgccaccgccttcacttcttctggtaaaacgaatacatctaattcatcagctaaatacggtcgagctgataatcctccacctacttttatatgaaaaccaacttttttctcaccatctatttctttcgttgcaggcgtaaatgcaacacagttaatttctgcgtttgctgaattataaatattagaactaatagacattttaaatttacgtggcaagttagaaaactcttcattatgttggaagtaatcatatacttcttttacaatattcgttgtatcaaatagttcatttgcatcaatgccagcaagcggattacctgtaatattccgcgttatatcaccacaagcccccgctgaagataacccaactcttgctaaccttttaaaaatatctggaatttgctgaatttctaaccagtgaaactgaatcgcctgtctcgtcgtaatatctattacatcacgtccataatcttcagcgatagaagcaagtacttctgcctgtgcatttgtaataatccctgacggaatatttacccgcatcataaaataaccagcttctttcggtctttgtaaatacaagcctgcccatttaaaggcatcccactcttctttcggaatagattcgaaaccattttccgcatagtaaggaatatcattaaaaatttctaagccatctttttctaatttatttttctcggtctgatttaatttttcattgttagcccatactttttcataactcattgtttatccccctatataaaactacgctcttgtaagtacttcacgatttgttctgcacattcttcaatagaatatttgtgcgtttctacaattaattccgcttgctctggctcttcataaggcgaatcaatacctgtgaaatccttaatatcaccttttcttgcctttttataaagtcctttcggatcacgtttctcacactcttcaatcggacacttcacaaaaatttcaataaattcatctgccgctaataaatctcttacttgtttgcggtctactcgaaatggtgaaataaatgctgtaaggacaactgctccttgatctacaaataactttgccacttcgccaatacgtcttatattttccatgcgatcactttcagaaaatcctaagtctttatttaaaccgtggcgaatgttatccccatccagcacataatttccaatattcttttcaaacagtttacgagcgaccgcattcgctactgtagatttacccgaagctgataaaccagtaaaccaaattacaaaactatgatgtccattcttcactcttctctcatcttttgaaaccgaagctgtatgccaagtaatattcgtatccatctcgttctctccctattctgttactacttcttttttcaagcctttaattagcacttccactacttctttacgactaaatgtacttggcggaatctcaccgtttcttaataattctcttactttcgtacccgataaaataacatgatcttcttttccgtgcggacatgttttcgttgaagccatcgcttcacatttcgtgcagtaaaaactatgttcaaagaatagtggtgtaattcctaactcttctatcgtaaaatttgtgaagatttcttgcgcttcatacgttccgtaataatctcctactccagcatgatcacgccctactataaagtgggtacatccaaaattctttcttactaacgcatgaaatatcgcttcccttggtcctgcgtaacgcatggcagcaggaaatacacttaaaaagacacgatttttcggataatatttttgaagaagtacttcatagctttccattcttacatcagcaggaatatcatccgatttcgtttctccgacgagcggatttaaaaagagaccatctacaatttcaagagcagatttttgaatatactcatgggcacgatgtaccgggtttctcgtttgaaatccgaccactgttttccacccacgttttttaaatgcttccctcgtttcaattgggtctaaatgataagaaggaaattgattattttcaaagcgttttgttagaataatagttcctccaacgtaaacgtttggtcgttcatataattttttcactcctggatgagcctcatccgttgttttatatacaagtaacgcttctttttctttatctggtacaaaaatatcttctatttgaatgacaccgtatatatttccattgttgacaagctttacttcctctccaaccttcaggctttctgcgactttttctgttaccggtaatgtaatcggtatactccacacactaccatttgctaaacgaagcgtttctacaactgaatcataatcttccttccctaaaaaaccagtaagggggctatatccacctgtcgccaatagttctaaatcacttaacgcaatattgtctaatttaatttctttttcaatttgtgatacgtcatatgtctcatctatacggtttactaattcgtttactatgctcatttttctatatcctctcttagctttatttcaagattcatcttattggtaatgaagaccacattcggttttcactttcccagcccatctaccatctcttgaatcgccaccatcccctacaggtaacgtacatttctcacacccaatacttggatagccaacatcatgcaacgggttatacggcaagctatgtttgtatacatatcgccaaacttctttccacgtccaatgaatgagtggacaaactttaatagattgaaaacgatgatcttgatttataaactttgtatgcttacgtgtttctgattgttcccttcttaagcccgatatccacgctttttccgctgctaatgatttttctaacggtaaaatttttctaatcttacaacaaagattcggattactttcccataatttctcgccatgcaacttctcttgttcatcaagcgtaagttccggttgtttttctataatatttaatgaaggaaatcgcctccgcactttttgaattaattcatatgtttcttgaaaatgaacatttgtatctaaaaatacaactttagcagatggatttacttggtttataaggtgcagcaataccataccttccaccccaaagctacatgcgtagacgatttcatctttatattctttataagcccactttaatactgatagcgcgccttttgtttcatcttcttccgaaaacgaaacaacattttcttcccacgtttcatacgtcaacatgttttttccccctgtaaaagcaaaaagacggttttaacctaatgaaaataggttaaaaccgcctctagtttttctagtcagcgcttttcactttaaacgtactttttcacttttctctaactgaattacttttccatcttgcacaacaattgtaattgaaccatatttcatatcagcaagcatcgcttcaatcttctcggatacttcatcaaaatgttcccgtacacccacgcgaacagcccccctttttattcataaaaaaaatctttcccatttcgaaaagactgttcggtaatatattttaccttatctttcaaaatggattccattttgctggatttagcaccttgctttctataagcaggttgccgagcttcttcgggccagttccctccgcttctcttgataagctttgtatttgtattttatcataattctgatttttttcaatcctagttttccgatatattttaattattttatttttacaaaaaaggaattgcccatccgaacaacccctttttctatttagacaagctctttaatacgtatgcgatcgttcccaataatattttcatatgtttcgcgttccacaactacttgcgatgttccgccttttgcaaagacaacggctggtcttcgaatccgattgtaattattcgccatcgagtacccgtatgctcctgtacaggaaactgctagtaaatcagaagaagcgacttttggtaaatgaatatcccaaatcaacatgtctccactctcacagcatttcccggcaatcgaaacgagttcctcattctcatcattccctcgattcgctaacatcgcttcataacgcgcgctatataaagcaggtcttaaattatctgtcattccaccatcgactgatacatatttccgaataccaggaatatctttcacagatccaactgtataaattgttgtcccagcatcacctacaatgctacgtcctggttcaatccatatttctggcaatggatattcacatacagtaaattgttctctcactgcacttgttacagctcgcacatatgtctcaagagttaatggtgtatctgactctgtgtagcgtattccaaatcccccgcctacatttaacacttttactacatagtttgtttgctctctcacttctactaaaaattggcgaagaacttcaatcgctcgaacaaaaccagctgtttcaaatatttgcgatccaatatgtgaatggatccctagcacattataattggatttttgtaaagcaaatgtaattgcctgcatcgcttgaccgtttgaaacgccaaatccaaatttcgaatcatcttggcctgtcgtaatatattcatgtgtgtgcgcctctactccaggcgttacacgaattaatatgttcacaaactttccatgttgcatcgctaaatcgtgtaaaacttctaattcaaagaaattatctacgacaaaacaaccgatattcgcctgaagagccatcactatttcttcttctgttttattatttccatgaaaatgaatacgtgatgccggaaatcctgcttggagcgcagtatataattctcccccagagacaacgtctaatgacatattctcttcacgagctactcggcacatctccatgcacaagaacgccttgcttgcatatgctacttgataagagaaaccactttctttaaaagcacgatgaaatgctcggcattttcctcgaatagactcttcatcgtatacataaagtggtgttccgtattgctttgctagctgcgtcgtatcgcaccctccaatttctaagtgtccttgcccattaattcggcttgtgccgtgtaaatacatttaaattcctcccttatttcctctaaaactcataaccccaatcttctattcattgcagcacgcttttagatagacaaaaaacgcgcggaacaatgttcacacgcgtttcttattaggaaaaatatatattgaaaaaataaacgagttgttatctcctcaaaataagaaaccgcatcaacatctccaaatagctctccataaaataaatcttatgacagtactacatttattcaatgcagtcccaatatatgaataagatggttattcttatatttcggcaatagtccctttcaacctatgatcacagattccattaaatctcccatagcttactctttcctatcgcggcctctacctttgagagtagatgaggtaagtctatttaattttcaaacatctaattgttgctattaacaataccaaaggaccattttatttgtcaaacaattttttatattgtttttttgcagtttaatttcgtatcgtctggtaagcgctttactaatacctttgttacttcccattcgccttcttcgttattaaatgtaatcgttaccttctcaaatggtggagcaattttcccagcaacacgttcatactttgtcacttcaatacttgcttgaaataaatatgtaccgctatacactttttttaaactaataattttaggacattgataaggtttcaaacttccatattgtttttcaattgctttatttatttttggaaataaaacagaataaagtgcatcttccataagaggtgcatcatattgggctaccgacacactcggtgaagtaaaaagtataacactactgcatgctataaaatataataattttcgcattataacctccgtattatcacgcgattctttctgcgtacaataattatcatacatagaaattctgttttattgtctcccaccactctttttctactcgattattataaaaaagcccacaaccttcttttattttcgtataatgatactcatagtataataatcataataacaaaggactgttcgtatatataaaatgagtcgttaagcaaactgactctcaagaactgtcatgctttttaggagaggagtatattatgctacaacatctgtttccaaaactgcgatttgcactcgttgcagtcgttttactatggattaaaacatatattgtgtacaagctagcatttgatattaaaattgataatttctttgaagaattcatgctttttatcaatccactagctgcgttacttttatttttcggcttagctttacttgcatctaagcaccgaaaccgaattataattggaatcagttttatactgtcatttattttatttggaaacgcaatgttttatgggttctataacgatttcgttactttcccagttttattccaaacaaacaatatggctgatttagggacaagtataaaagaactctttacgtacaaaacattacttttatttgcagatgcaattattttaatgtttatttcgcgtaaattcccatcatttggcgacaaaacaccactttcccgctcagagaagcgaactttctttagcggtgtaacagctttattagcactacaaattgttgtatcagttatttataaaccacaaatgttctcacgctcatttgaccgtcaaactgtcgtgaagaatttaggtttatacacatatcatctatttgatattacgcttcaatccaagtcctcagctgagcgtgtatttgcaagtggggatgggttttctgaaattaaaaactatacagactcaaaagacaaacaagttgataaaaacttatttggagctgcaaaaggtaaaaatgtaattttaatttcaatggaatctacacaaagctttgttattaataaaaaaataaatggaaaagaaattacaccatttttaaatgaatttattaaggatagtttctatttcgataacttctatcatcaaactggacaaggtaaaacttctgatgctgaatttatcgttgaaaactcactttatccgctagatcgtggttctgtattctttactcatgcaacaaatgaatacacagcgacaccagaacaattaaagaaatacggatattcttctgccgtcttccattcaaatgataaaacgttttggaatcgggatgtaatgtatcctgcgcttggatatgatcgttactttaatttaaatgattacgcaggaacggagcaaatgtctgtcggttggggattaaaagataaagagttctttgaacaatctattccaaagttaaaatctttaccgcaaccgttctatacaaaatttattacattaacaaatcattttccatttcttctaaatccggaagatcaatatgttgatgaattcaactcggaaagtggtgttgtaaaccgctacttcccaactgttcgttacacagatgaagctcttaaattatttattaaacaattaaaagaagaaggattgtatgataataccgttattgtcatctatggtgatcattacggtatttccgaaaaccataacgcagctatggcacagttcctaggaaaagatactattacaccattcgattctatgcaattacaacgagtccctcttattattcatgtgcctggccaagaaggaaaagttgtttctaaagtatccggtcaaattgatattaagccaacgctccttcatttacttggtattaaaacaaataaatccgttgaatttggaactgacttatttattaaagagaaagacccgcttatggtaatgcgtgatggtagctttgtttctgaagagtatgtttatacaaaaaatatgtgctacaaaagaagtacgggtgaagaagctgacatgacgctatgtcagccgtatattgaaaaagcaaaaacagaattaaaactctccgataaattaatttatggagatttattacgcttcgatcctaataatcgatataaaactggaacgatgacaacgaaatttgaatagtaaaggaagcaactttatacaagttgcttcctctttttattttcacttaattttcaaaccatccttctatgaaatctttcacaaattggtaatttctttcgtatgaggaataaatttatggtatgataaaataagtaaactttcatacactaattaagaatttattacagaaagcaagggatcagattttgtatagagcagctattccaaacttatttacgctcggaaatttatatagcggatttttatcaatcggctatgcatctttaggatattataaatcagctgctattttagtacttatcgggatgatgttagatagtcttgatggtcgtgttgctcgtttattacgtgttgattcacaaatgggaaaagagctcgactcgcttgcagatgtcgtaacatttggtgcagcaccagctgttttaatgtattacacatctttctcaaactacggaatcatcggattatacatagcgggattattccctcttttcggagcatatcgtttagcacgatttaatgtaacaccatcttctacttcaatgaaatatttcactggagtaccgattacagcagcgggagggcttgttgctttcttaacattattttcacataccattccaaaaatcgttcttattaccgtatttgtaacgttcgcatttttaatggtgagccgcattcgtatcccaagtttaaaagatgtaccaattccacgatatagcatcattattacactatttttagttggaatcattattacaatgtatcaaacaggatttggaaatttttctgttttcttatttattgccattccactatatattttgtacatgttatctcaattcattagacaaagaccgtctaaaaaagcgaataaagaaaaataagaaaaccttccgagtccggaaggtttctttttattttgtaactaataccttttgatttacaggtgttactggctcttcgccgtttaatacagctaaaatatttctgacagccatttcagccatcgcatcacgagtttcaaatgttgcattccctacgtgtggagcaagtactacattctttaattcttttagctcttctgtaattttcggttcaaattcaaacacgtcaagagctgctccttcaatttcattcgtttttaatgcatgagcaagtgctgcttcattcataattggtccacgtgaagcatttacaatatacgctgttttcttcatcattttaaactgctcttcatcaatcatatgatgtaaatttggactataagcacagttaattgtaataaagtctgctgtttgtaataattcttccaacatcacatacgttgcccccagctcactttcagcttcaagcttacgatttggccctgtatataaaacatccattccaaatgctttcgcacgttttgcaacagccttcccgatttctccaagacctataattccgattgtcttaccatgaacttctcgtcctaagaaaaataacggtgcccatccgttaaatccagtcgtacgacataacgtatccccttcaggaattctacgcgccgctgctaaaagaagtgcaaatgttaattctgcagtcgcttccgttgatactttcggtgtattcgtaactgcaattcctttttcgcccgcatacttgtaatcaatattgtcgtaaccagcaccatagtttgcaacaatctttaaatgaggcgctgcatcaataacttcttttggcacctttgtcgaaagtaaacttaacaatgcatctttatcttttacacgctctgttaattcatctatagaaattaactcctctttatcgtacatttctacatcatgatcttttaatagttctaatccaatttccggaatttttcccgctactaatatttttgccactactaacacctcttctatagaaaataagatatctcttatatttcattgtaagaaatccacatataaaaaccaaggaatttgattatagttttaaaaatcgacacttttccatgaaaaaagaggagatgcaactctccccttttcttacgctttttcctgcgattcttttccaagcttcacatcaatcgttccttctgcaaccgtatcgctaatttgctcctcaataaccgattgagattcagcattcgtttcagaagtataagcttgttgctgtgcaccttgtacattttgtttattttgttgtttcgccatttcttaccctccttttcattctttcttattttgaacaaaaaggacggttttcatcaaaaaattgcgtttcattttgaatttgttacttcttcttcaagcgacctcattactcttgctcgcttcgtaaatgttgcaacctgagtaacaccgtgagctagtaatgtttgtacattttcttgtacataattccctaaatcatttggataatgggcatccgaagaaatcgtaattggaacaccatacttagctaatacttgtaaatatagtggacttgggcacatttcacgaacaggataacgatagtataatcctgcatttatttctgttgccgtattcgtttctactaacgcacaggcaatttcctcataataagaaagctgttcattctcatccaatcgataattaaatacctttatattatcaagatgagcgataatatcaaataactcggtacgaatcgcactctcaactgttttaaaaaacatatcatataatgcgcgtaggtcatgcttctcaaaatattctttcgtatctggattatcaaatccccagccatttagaaaatgaacggaaccaattatataatcaaagtctcctagcgctaataattcttttaactctccttcacaaccaataaaataatccgcttcaattccaagtttaagtgtgacacctcttttactccatcgttctttcgcctcttcaatgacctttgtaaaatcatacagtgaaactacccttacttgatctaaccattccttctgtatacgaccgagcttagaatcactaatatctacatatttttcataatatcctttcgcttcatgaaaacgatataaatgatcaacaatcccaacttctgttataccttttcgcacagcttcttctaaatagaggtccatccattctgttgtaaatggcccttccttcacacgcttttgcaaacgctcttgtgttttcataagccaatcaatagaatgcctttcttgaagcggttcataacgttccagcgcttcatttattttagcaagccatcctattgaatacggtccttcttctaagtgaagatgataatctactttcatatacattcccccttataatgtatctatttcccttctatccccaactctcgaaagctttccatttcgttctttcacctctcgcatgacatcttccaatgtaatatttttttcagctaataaaacgaaacagtgataaaatacatcaaccatttctttcactacttcttctttatcattatttttacatgcgataattacttcagcacactcttcaccaattttctttaaaattttatcttctccttttgaaaataaataatttgtatacgattcaggaagtgggctttcctttcgttcttcaattgttttatacagcaacttaaaggcattttccatatgtatccccctatataatttgatagtgaaaacatgtcttctctcccgtatgacaagcaggtcctacttgtttcacattcacaacaattgaatcttgatcacaatctaaatataaagattgcacatattgaagattccctgatgtttcccccttattccataacgactgcctcgaacgagaataaaaccatgttcttttcgtctctaacgttttttcatatgcttcttcattcatataagctagcattaaaacttctttcgtaccttcttcgatgacaattgctggtattaatccttttgaaaaattaggtttcataaccgcacctcaacatttgcatctcttaattttcgctttacactctgcactgtcgcctcaccataatgaaagatggatgccgctaacgctgcatcaactgttgtcttttgaaaaacttctataatgtgatccgtatgaccacagccccctgatgcgatgactggaatggaaacactttttgaaatttcttctgttaaacgaaggtcatatccgcttttcgttccatctgcatccatactcgttaacaaaatttcacctgccccaagtttaacaacacgcttcgcccattctatggcatccattcctgtgtcaactcttccgccgttgacgtatacgttccatttaccttctgctacttttctagcatcaattgccacgacaatacattgtgatccaaagtgttctgccccttcttctataagcttcgggtttcgcactgccgctgagtttattgaaactttgtctgctccagctcttagtaaattgtacatatctttcacacttgaaatccccccgccaaccgtaagaggaataaatactttagctgctgttttttctacaacatctataatcgtttttcttccttcatgagtcgctgtaatatctaaaaatacgatttcatctgcccctgcctcgttatatgcttcagctatttcaaccggattaccgacatcttgtaatcctataaaatttacaccctttacgactcgcccttctttcacatctagacatggaatgattcgtttcgctaacataacttcgttacctgtaacacttcttctaaatcaatcgttttctcgtaaagcgcctttccaattatgacaccatatatattcatatcatttaactttttcacatcttgaatagatgccactcctccagaggcgatgagacgaatgcccacacttttttgaagtatcgctaattgttcaaaatttggacctgcaagcgtcccgtctttcgaaatgtctgtaaacacaatcgtttgaacacctaaactttccatttgtttcgctaaactaacgtaagaaatttcagacagatcaagccaacctctcgttgctacgaaaccatttttcgcatcaattccaacaatgattttctctttatatagacgaactgcttcctctaaaaatgacttatcataaagagctgctgttcctaaaatcactttttctacacctgctgacaataacttctccaccgttacaagtgaacgaattcctcctcccacttgcacaggaatacgtaccgccttgcagattttttcaatgacgggcaaatttaacgactcgccagcaattgcaccgtctaaatcaacaatgtgtagtatttccgctccaagcttttcaaatatgatcgcctgcgctaccggatcttcattcatcaccgtttctttactaaactctccttgataaagtctaacgcatcgcccttcttttaaatcgatagctgggaagatttccatgcttctaccactccttgaaaattttttaatatttgcatgccaatttcgccacttttttctggatgaaactgtgcaccaaatacatttcctttcgcgacaaaccctggtatttgcattccataatcacttactccgcatacaatttcatctggacaatccgcgtaatatgagtgaacataatacacgaaagaaccatccactaatccattccaaagcggaaattctctttccttccttaattcattccatcccatatgaggaattttatacgaaacttttaacttccgaatttcacctggtagtaaacctaacccgctacaatcttttagttcctcacttcgttcaaataaaagttgcatgcccaaacatataccgaggagtggttttcctatgtcacaaacttcttttagtacacacactaaatctctttcttttaatacttccatcgctttcggaaatgcacctactcccggtagaatcacgccatcgcttctcaatatctcttctttatcactcgttacaatgtactctgcctcaatatattttaatgcttgctctacactgcgaatattccccattccataatctataatggcaatcaattacaacatccctttcgttgaatttacaccagtaatgttggcatttttttcgaccgcttctctaagcgctctaccaaaagctttaaataatgcttcaattttgtgatgtgtattacttccgtatagaacgcgcgcatgtaatgtaatattggcagcatgtgcaactgctctaaaaaattcttccgtcaattctgtatcaaaatccccgagcttcggatttgttaattccccttgaaatacacaatatgagcgtccacttatatcaattgcaacaaatcctaaagattcatccatcggtacatacgcggaaccgtaacgattaattccttctttattttgcaatgcttctttcaagcaatttccgagtacaattccaacatcttcaacggtgtgatgtgcatcgacaaatacatcaccttctgcctcaacttgcaatccaaatcttccatgtctagcaaataaagtcagcatatgatcgaaaaaaccaacccccgtttgaatagatacactcgtactttcatcaagctgcaaacttaatttaatttttgtttctgtcgtctcacgtgcttgactggactgacgcattatttttcctcctcaaaccttatttggattgctctcgcatgtgcatgtaacccttctttatttgcaagctctacaatatgatgctgtacattttttaatgcttcctctgtataagaaataaaacttgattttttcacgaaatcatcgactgataacggagaaaaaaatcttgccgttccgctcgttggtaatacatgattcggtcccgccaaataatccccgagcggttcaggtgcatatggcccaaggaaaatagagcctgcatgtttcacataatctagagcattcatcggttcttttatatgtaactctaaatgttctggagcaatttcatttgataactttagtgcctcctctaaagaagcaacgataaagatggctccatttctatttattgattcacgtgcaatttcacttcttggtaacgtttctaactgtctttctacctctttttctacttctttagctagttccatattcgttgtaatacaaatcgccgttgctctctcatcatgctctgcttgcgataataaatccgctgcgatatattttgcattacctgtttcatccgcgacaactacaatttctgatggaccagcaatcatatcgatatttactatcccgtatacttctcgtttcgctagagcgacgtacaaatttcccggtccaactattttatccactttcggaatcgattccgtcccgtatgctaaagcagcaattgcttgtgcgccacctatcgtataaatttcatctactcccgcaagatttgcagcagctactatatgaggatcaattccccctttcctcggcggtgttaccattacaatttttttcacacctgcaagtttcgccggcaatacattcattaatactgaagaaggatatgaagctgtcccacctggtacatatacacctacattttctaatggccgaataagctgccctctaattatgcctttactttcacaatcgaagattgaatacttcttttgtttttcgtgatacgaaacaatgtttttcttcgcctcttttaaagcttctaaaaatgaattctctacaaacatactcgcttgctgtatttcttcttcacttacacgaaaatctttcatctctacaccatcaaacttttttgtatagaaagataaagcctcatcatttccttcccttacatgtctaatgatttctcttacacttctttgaacagtttcttctattatattagcgttttctcttagcacttttattttagataatgcctccttaaagtcttcataaatgatttccattttaaatcctcctatttccctgataagatttcttgctccatcatatttataatgctgaatatttcgtcttttttagtttttaaggctgccttatttacaatcatccgagccgatataaagtacatttcctcaaatacaatgagtccattctcttgtaatgtttttcctgtttcaacaatatctacaatcgcatctgccaatccaagaagaggagcgatttctacagaaccttctattttaataatttctacatcctctcccttatcatgaaaataagtagaagtaatatgtgggtatttcgtagcgattcttttcttccggtaactcttcggattatacgtaggaatagaagcaacacaaaacttacaaatccccactcctaaatccagcatttcataaatatctttctcgttttccattaaaatatcttttccaacgatgccaatatcagctaccccatgttctacataagtagcaacatcaaccgcttttactaaaataaatgaaatatttgtatttttactttgaaatacaagcttccgacctttatttttgagctcggaacaatcaattccaatctgctcaaaaagtggaatgacatgtttttctaatcttcctttcgttaacgcaatttgaatgttacgcatgaagcctctccttctttctggactacccatttctcattccatacatattccactaaatattcattctttgcctcaacaaccgttcctattttattttttcttgcaaattgaaaggtatcgcttaaattagagaatagagataaccaagcattcttcccatcctttcgaagtaaatttcgtaacctttctgcttccgctaatctatttaactcataatgaatcacaatatcaatttgatttcgttcatatggttcttgctgctcttgcagcgccttcacaatttgatttacttgtaccgcgagtccaacagctggcagcatttctccaaaattgccaattagctcatcgtatcttccgccactaacgatttcttctccaatttcatatatatatcctttgaaaataacacccgtatagtaatctaagtgttgaatcatacccaaatcaattgatatgtaagaaccatatcctaacgtttcaattgtttcatacatttcttttattcttgcaattgccattttcatttcattacttgaagcaagcttttctgcttcctcaataacttctaaatttccaaatagccttggcaatttctcaagtaaccttactgtctcatcgcatcgatttaatttcttttctccgataaaatttgagagggctgcataatttttactttctatatacgttctaagtaccctttcttcttcatcatggatggagagtttttttacaatacatttatataactgtacttgcccaatctcaattgtaaaagattgcaccttcaacttttgaagtgcttgaatgacacttattacacattcaatttcagctcttacattatcaatcccgataacttcaataccactttgtacgatttcattatattttccagaatgggattcattcgctcgaaatacattcccgctatacgtcactttaagtggcgtatcccatctctgtgttccaataactctcgctaaaggaattgtcatatctggacgtaaaacgataatccttcccttttcatcaaaaaatttatacatcttctcttcatctatcggtctattttgaaatgcaaaaacatcataaaattcaattgtaggtgttcttatttcctcataacctctctctaaaaaagtaagccttaatttctgttctacttcttcaattaacgtacattcttcgaataaataatctctcgttccattcgggtttgctcgtttccattttgtcatctaaattttcacacctttccccttctaatgtatgcctatttcattcccctaagccgaaaataaaaagagccttgtagacaaaatacctacaaggctcttcagtagagtgtaggtacaacgggaataacccttgtacctacacgttttcacgctaggttcaagggtttcatgtatgatgatgtagttgtgtaagcattgtaatagattgcacgatattcataatacttactccctttctcctctgattttcacatagtatataacagttaattttgaatgtaaatacatttttaatattccgtcacttttttaatgtaaagccacttttctttcatactcttttatttcttgttcatattgcattgtaatactaatttcatctaaaccatttaataacttctctttccacattttctcgattgtaaaatggaatctatgcgtattcgttgtcattatttcattttctaaatcaactgtaatttgttccctcgcatctgttttagcaagttgttcacgcatatctttatccattacaatcggtaacatgccattcttcatacaattcatataaaagatatcggcaaatcctccagcgataataacgcggaaaccataatcagcaagcgcccatggagcatgttctcttgacgagccacatccaaaattatcacctgtgattaatatactggctccttttctttcttgtgcattaagcgggaaattagggttttcttggcgattattatcatatcgccactcatcaaataaaaacttcccaaacccagttctttcaattctctttaaatattgcttcggaataatttgatctgtatcaatgttatcattcatcagtactgcggcagtacctttatgaatacgaaatggctccatcataactctcctttctaatatcaacaaaatgaccatataacgcagccgctgccgccattgccgggctaactaaatgcgttcgtgctccctttccttgtcttccttcaaaattgcgatttgacgtagaggcacaatgttccccttcaggcacttgatctggattcatacctagacacattgagcatccgggctctctccattcaaatccagcttcttcaaatatgcgatgtaatcctttatgcatcgctgcttctcttaccctttgagatccaggtacaacaagtgctcgcacaccttcttttacttttttacctttcacgacagatgcagcaatttctaagtcagaaagcctggaatttgtacaagatccaatgaaaacatgttgaactggaatgtcatacgtactttgtccgggactcaatcccatataagaaaacgctctttcgtcatttgcatcatgcttttctggcaatttctcatcgatccgaacgcccatactaggatttgttccccacgtaacgtacggcgctaaatccgtaacatctactagaatatgtaaatcataaactgcatctaaatctgtataaagttctgaccattttttcttaatagattcatagtctttcggtgcatatttacgcccttttacgtaagcaaccgttttttcatctggtgcaataatgccagcctttgctcccccttcaattgccatattgcaaagcgtcatcctctcttccatatccatagcatgaatggcctctccgtaaaattccattacgtaacctgttccaactgctactccgtactttgaaagaaggtgtaaaataatatctttcgcataaacaccttgcggtaactttccttttaactcaatgcccattgctttcggctttcgttgccataacgtttgcgtcgccaatacatgttccacttcactcgtaccaataccaaacgctagtgcgccaaaagcaccgtgtgttgctgtatgactatcaccacaaacaatcgtttttcctggctgtgtgagtccaagttctggtcctattacatgaacgatcccttgctcttcatctccgatatccgctaatggcacctgaaattgtttacagttttcccgaagtgtatctagttgctgcttcgcaatgcggtcggtaatattccaaacatctttcgttggaatattatgatccatcgttgcaaatgttaaatctggtctgcggactgttcgatttgtaagccgcaagccttcaaaggcttgcggtgacgttacttcatgaacaagatgtagatcgatatataataaatccaatccattttcattagtcgcaactacatgtctttcccaaagcttatctagtaaccttttccccattatcttcctctccctactaacgcttgctcttccatttcttgaataactgcctttgtaaatgaagttgtcgtttcagtccccccgatatctgctgtacattttcctgatttaaggactgcagaaactgcttcttcaattgcatatccttctctcgttaatccgaacgattgcccaagcatcattgcaacagaacgcatcatcgcaattggattcgccttatttttccccgcaatatccggtgctgatccgtgaataggctcgtataatgaaggccccttttcagcgtgacttgctgatggaagcattcctaatgatccagctaatactgaagcctcatcacttaaaatatcaccaaataaattttccgttacaataacgtcaaatcttcctggattccgaattaattccatagctgctgcatctactaaaatgtgttctacttccacatttgggtagcgaagtgctacttcttctgtcacagttctccataatttactagactctaaaacattcgctttatcaatagatgttacttttttcttccgcttattcgctaattgaaaagcatacgaaacgatacgttcaatttcatggcgatgatacgtaagtgtatctgtcgccacttcttccgttcgctctttcggataagaaaaataaattccacctgttaattcacgaacgacaacgaaatcaatttcatcagcgttttttaatggtgataaatgtgcagttgcactttctaccgttacagggcgaacattcgcaaatacaccgagtccttttcttaatgctaataatcctttctcaggcctttctttcgcactatcccaccttggtccacctactgctccaagtaaaaccgcatcactcgctaaacaggcggcaagtgttcgctgtggtaatggttgcccagttaaatcgatagcaacaccaccaaagtactcatcttgcaaatgaaaatgatgtccatatagcctttctaccatatgcaatacttccttcgcactttccattacttctggaccaacaccatcaccagctaaacaaacgatacgtttttccatttttaacactccttttaactgaattttcagaactttaatttgataggtgaggaaagcttctctcacctatcaaatatttatttcccaagcgctataagagattttaatttccctgctgcatggacataagctctcgccgacgcttccaatacgtcttgcgcaactccgaaacctgatatttggtgactaccttcttttaattcaacatgaacgtgagcaagtgcatcttgaccttgtgtaatagattgtatgcgataatctgccaattcacattctaatcctaaaattctttgaatcgcattgtatatcgcttcaatactaccagaaccagtggctgcatcttcatatacatttccttcctcatccttcagcacaactgttgcgcattgtgtactatttgatacgaaatgcacttgtaattgcgtaatgttatattgctgagctgcaaatgctgcttcaccaagcataagtgcgcgtaaatcttcttcagtaatttcctttttacgatcagccaactttttaaatgcttcgaatgccgcatctcgctcttcatttgtaaattcataaccaagctctttcattttttccgtaaacgcatgacggccagaatgtttcccaagtacaaagagattttgagattctcctataagcgctggttcgataatttcataagttgttacttcttttaaaaccccgtcttggtgaatgcccgattcatgagcaaatgcattcgctccaacgattgctttatttttcggtacaaccatacccgttaacctgcttactaatatactcgtcgccttaatttcttttaaagtcattgaaggctctgctttataaaaatcttttctaatatgaagagctaccgcaacttcttctaacgctgcattccctgctctttctccaatgccattaatcgttccttctacttgcaatgctcctccttcaaccgcagctaacgaatttgctactgccataccaagatcatcgtgacaatgacaagaaaaaatcgctttttcatatgatggaacggattcttgtaagtatttaaaaagagaataatactcttctggattcgtatatccaactgtatccggaatattaattacattcgctcctgctcgaattgcaatttctactgcttcagctaaaaatgctctcgatgttcttgtcgcatcttctgcagaaaattgtactgtcggaaataatgattttccaagcgtaaccgagcgatgaatactatttaacacatcttcttttgacatacaaagtttatatttcatatgaatatcactcgtagctaaaaatacgtgtagacgaggagatacagcacctttcacagcttcatatgctcttcgaatgtcactttctttcgctctagctaaactcataaccgtagcattttgaattgtattcgcaatacgttttaccgattgaaagtcaccttcggaagctgccgcgaatccagcttccattacatgaataccaagcctctctaattgcctagcaatttgtaatttctcttgttcatttaaatttactcctggtgattgttcgccatcacgaagcgttgtatccatgaacaaaacctgcttcatattatttaacccctacctttactcgcggctgtacgaaaggcatcatttcacgtaatttacgtccaactacttcgatttcatgtttattctctttctcatttgtcgcatggaaatttggtcttcctgctttatgctctgcaatccagcctcttgcaaatgtaccatcttgaatttctgctaatactgcccccatcgctttcttcgtatcttcagtaacaacgcgtggtcctgatacgaagtctccccactgcgctgtatctgaaactgaatatctcatattttcaagtccaccttcgtacataaggtcaacgattagcttcagttcatgtaaacattcaaaatatgcaagttcaggctgatatcctgcatcaactaacgtttcaaaccctgcttttacaagtgcagtcactccgccgcagagtacagcttgctctccaaataaatctgtttctgtttcttctttaaacgtcgtttctagtacaccagctctcgttgctccaattccgtcagcataagaaagtgctttttcagtcgcaactcctgttgcatcttgatatactgcaaataatgcaggaacagccccgccctcggcgaacgtacggcgtacgagatgccccggtccttttggcgctactagaaatacatctacattagctggtggttttacttgatcaaagtgaacattaaatccatgtgcgaacacgagggagtttccagcctgtaaatttggtgcaatttcagcttcatatacttctggttgtaattcatcaggcagtagaatcattactacatcagctttttccgctgcttctgctactgtatatacagaaaatccatcttcattcgctttattccaagacttaccttttcttaaacctactactacatcaaatccgttatcacgtaaattttgcgcatgtgcatgaccttgcgagccatatccgatgattgctactttcttttcctttaatacatttactgttacatctttctcataataaacttttgccattttcatttccccctatatttaaatgattattgaattaacataacttgcttatcttgttttttcatactacgtgtaaatgctgttacacctgttctagcaatttctttcaaaccgtatggacgaagtaattcaattaacgcttctactttgtcttgcgtacctgttacttgcacaactatggaatccttcccaacatctattacagcggctcgaaacggttcaattaaactatataattctgccctcgctacagaagttgctactttaataagagcaagctctctagcaatcatcgcttcttctgtaatatctgatactttcagtacgtcaatttgtttatgcagttgtttaattaactgctccacttgctgttcactttcaacgtgtacaacaatcgtcattcgcgatatatctgatgattctgtatgacctactgaaatactttcaatattaaaatgtcttcgtgtcataacccctgtaattcggtttaaaacaccactttgatttcgaactgtcgctgtaacaattctcttcaccctttttccactccctccatttggtgaacaccttttcctggcgcaaccatcggcataaccttctctgattgaagtacacgacaatcaattacgactggctcttgtaattcaatagcatgctggatttgcttctttgcaagaagtggatcgtcaatacgaacaccttttatgccatatgcattcgcaagagcgacgaaatctggttggcatggtaataaagaatgtgaatatctttgattgtaaaattcatcttgccactgtcttaccattcctaaagcttcattatttaaaataaatactttaacgggtaaagcgtgttcttttaatacacttaattcttgtagagtcatttgaaacccagcatcaccaacaattgcaataactaattcttcaggctttgcaatttgcgcaccgattgctgctggaaatccaaaccccatcgttcctaatccaccagaagttacccatttatctggatttttcagcggataatattgggctgcccacatttggtgttgcccaacgtctgttgttacaatcgcttctcccttcgtaatttcatataacatatcaattgcgtattggggcttaatactttcagaatttcttttataagagaatggatattgttcttttctcccctttaataaagtgatccattcatgatgattttcttttcccccttctggttcaagtaatacttccaatgcccgcttagcacttgcaacaataggaatttcagttggcacatttttcccgatttctgctggatcgatatcgatatgcgcaacagtagcccctttagcaaaataagctaaattccctgtaagccgatcatcaaatctcgcgcctatattaatgagtaagtcacattcatataacgctatatttgctgtataagaaccatgcattcctcccatccctagaaatagttcatcatctggtggaaaaccaccaagaccaagtaatgtatgcacaacagggatttcatatttacgagcaaaatttgtcaattctttcgaagctttcgcatgcaatatacccgctccagctaaaattaacggtttttttgcggtttcaattactttgagtaatttgtttatttgaagtagattcggttcataattagggttatatcccggtaaatccatttgtacattgctacattgctcacctttctcgactaccatatctttcggaaggtcaataacgactggtcctggtcttccagttttagcaatatgaaatgcttctttaataattcgaggtaaatctgaggcctttcgcacttgatagttatgttttgtcactggcatcgtaagtcccataatatctgcctcttgaaaagcatcgctcccaattaacgttgttgctacttggcctgtaaatactacaagtggcaatgaatcaatcatcgcatcagctagacccgtaattacatttgtagcacctggcccactcgttgcaattacaacccctggatgccctgtaattctggcatacccttcagcagcgtgaattgccccttgctcatgccttgttaaaatatgcggaatttcacaatcatacaatgcatcatagagaggtaaaacggcaccacccggataaccgaaaatcacttctacgccttccttttctagcgcttctaacaatagctgtgcaccagttgccagtttctcttccgtttttgaagacattgttcttataagccccctttttcaaacttttatacaataaaaaaatcctacgtccacactccagctatgtgctgaagggacgaaagatttcgcggtaccacccttcttcgcaagaatactcttgcctcagtgatccataaatggatctagctaataacggagctaccgtctaagcctagacaaatgctttagcttagcactcaagggcgatgttcgtcgacgtgaaccatcggttttcagcaaccaccgactctctgtgaggcttcacaatcaactactcctccctatcaacgctttcttatgttaaaaaagttgttatccaactttattttcttcgtaaattttctctccatcttctacaactaacttacgaaactcttttaataaacggttcgtatgtggacctgtttgccctaagccaatcgttctaccatctactgtcgtaacagcaatcacttcagcagctgttcctgttaaaaacacttcatcagctacatatacatcatgtcttgtaaataactcttctcttacgtcatacccaagtttttcgccgatttctaaaatggcgtttcgtgtaataccttctaacgctccagcagaacttggtggtgtaattaatttatttcctttaacaataaacacgttatctcctgatccttcagctacatatccttgatcatttaacataagtgcttcttgtactccagctaatttcgcttcaatacgaactaaaatattgtttaagtaatttaaagattttacttgaggggataaaacatcgggacgatttcggcgcgttgcaactgttacaactggaatccctttctcataatattcttgtgggaataaagataattgttctgcaattactactacattcggcttcttacatgaatcgggatccaatccaagatttcctgctcctcttgatacaacaaggcgaatgtatccattagataatttattttgtcgaatcgtctcaacaacaatatttgttacttcatctaatgaatatggaatttctaaaaggattgattttgctgattcatacagccggacaagatgctctctcaaacggaaaacattaccgctataaactctaattccttcaaacactccatcgccatataaatagccatgatcatatactgaaacttttgcctcatcttttggaacaaattctccatttaagaaaatccattgctcattcactagaagcgcctcctatgttctatgaattttttattgtttcctagtttactctcctttctaaataaatcaagtgaattttttagaaaatttataatttttaatcatacgtacttctttgcttatactgatttaacaacattgttaacgtttacaaaaagtcaaaaaatttttttcgccaacttccactaaaaaaatatttgtttaaaagaaggattttcatcaattgatacgaatctattgtattcaataaacggacgtccgattttataaatccggggatatataacgacttttgctgaaaaagggggaaaataacaaaaatagcgctgtctaaaaataacattcatatttttcatttcgtaatcataatcctatttttaaaaaacaatttgtcaaaataaaggaggaaataaatatggcgtgtgtacaaattaaaggaacgagacaagaggtagtagaaatgctgcaattatttgatctaatggatacgaaaggtttttgtaaattcgataattacgtagaggtagaaccaaatacgaaagaacataatcattttattgcttcaatcgacatccattcaaatacttcttcagcacaagatacattaaacgatcaattcgttagtcaaatgcttactggcgtatataacgactaaacaaagatttacttcctaccgtcttttcataaatatatgcagtgaacttgagcatactagcaattagatggtaggaggtgataattatggctagaattggcgttgaaaactcattaacagacgttcaacaagctcttcaacaacaaggtcatgaagttgttacacttaactcagaacaggatgcacaagggtgtgattgttgcgttgtaactgggcaagattctaatgtgatgggcattgcagatacatcaattaaaggatcagtcattacagctcacggtttaacaacggatgaaatttgtcaacaagttgaaagtcgcacttaaaaaatgcaagaggaccccttttaaaaggagtcctcttttttatattcacctaacgggaaagtaacatatactggatgaaagccctacctctctctcatcattacggttccactgaccgctccttgattcactagtatacatatatagcttacaaatacaatttatagggtttgttcacaaaagttgttgataaaattacccgatctttcgcaaacttttcgtattgcattcataagagatatttactttacactagctgtaaccgagacacgaattaaaatcttaacaccaatacaataacttgtcaacttttttccgcaaattaaaaacagacattaacggtttgtctgttttaaaatggagctttttcttttattacatatacaacaaagccgcttactaacataaataagccaactactaagtttttgatattaatcataaattcctctcccttattccacacatcatatatatttacatttcaattattccgatcatcctaaagcgcactttttctaatatatcataattcctaaaaaatgcaagttcacttttgacgaccattcacaaatttatctacagtgcttggtacagtatttaaggccttttcaattaaatgtgtactgctgttgagatgtaatacttgcaccccattagaaccaactactaaaaaagctactggactaatggaaaccccagccccgcttcctcctccaaatggatgcccttgtttgttctctttatgctgattttgcccaccgttatgtttttcagtgatgaaatcccctttaaaatcacttccaccagctccaaaaccaaaagccacttgagatactgttaatactacatttccgtcagctgttgaaaccgggctcccaacaattgtatttacatctaccatctcttttaaatttgtcattgccgttttcattaaattttcaattggatgttccattatgtattgcaccctttcctcattattcctttttatattttccaaaatagaggaagtcatactaacttttcctattttaaaaaaacattttccttcttttaaaagatactactccctgtacatgctccggtatagtgaaactttaatcagtgggatgtgtacgtagctcgactcccacaaatagcgggataaaaaagaaaaagagatacatactactattgaaccttgttatgaaaggagtcatgactttgactgagaaatttgatgattataaaaaaagagatagaatagatagtgattatagtgactataaagaagagtacgccgctgaggtcgcaccacaacgcattgattatgattacgatgataaagacgataaagatgttgtaaaatcgtccgctgctggatcaactgctggttttatcgctcttgcgctatctatcttatcgctatttacatttccaacactatttggtcttgtttctgttttactcggtatttacgcttataatcgcggagctactgtaactggcggtatcgctgcagttgtcggtggaattgctgcacttatcgcaattttattccgagtagcacttattggtctattgttctccctgttctaaaaaagaaaaaggtatctcgcttaacgcgggataccttatcctgtaaacacatcttccgatggatattttattttttgttttgctggtcgcgctaaagagaacacaagtgttaatggtccaattaatccgcagaacataacaaacataataatacattttccgaatgccgatagctgtgcagtaattcccatcgttaatccgactgtgccaaacgctgatattgtctcaaataataattgaataaagctgaagttttctgtaagcattaatatgaataccgctgctaaaataagtatttgactggcaacagcaattgctaatgccctcgttactgtcgacattttaattgtacgctgaaataaaacaatttcctccttttttctaaagaaagaaaggacagatgtaattaagataacaaacgtcgttaatttaattcctccacctgtcgatacacttcctgcaccaataaacattaaaatcatcgtaaataatatagatgattcttccatacctccatagtcaaccgtattaaatccagctgtccgcggagtaataccttgaaagaaggaagcccatagtttttcatttaaagataaattccctaacgtcttcacattattatattccaatacaaaaatcacaatcattgctataacatttagcactactgttccaataatcattatttttgagtgaagtgataattttcgaaaactgcgactataccatatatcaattaatacggtaaaaccgagtcctccgattacaattaaagagcaaatcccaatattaataatgggatcccctacatatcttgttaaattatctggccataaagcaaatcctgcattattataagatgcaattacatgaaaaatactatagtataaaccttttccaaaaccaaactctggaataaagcgaaacgataaaaagatgaccccaataagttcaatacaaatcgaaaatataaagacacgctttactaattttacaagaccacctatatttgtttgattaaatgcttctccaattaataaacgatggcgtaatccgatttttttacctagtacccaaacaattaaaatggcaattgtcataagacctagaccacctgtttgaattaaaaacataataacaatttcgccaaacatcgtaaatgtacttgctgtatccactactcccaaaccagttacggtcgctgctgacgttgctgtaaagaaagcatctacccaactaatatgtgctttcgttgcgaatggtaattttaataacaaaccgccaaccacaattaagcagaaaaagcctaatgctaatatttgtggtgggtttaatcgtataagacgattatacagcccttgtttttttgttacgtccatatcattaactcccttattaaagtgaagcttcccctcatacaataaaaagctttttaaaagcccttaaataattgggacaaaccttatattctcataatatagttgagcataatcttttttttcatagattacaacttttatttatattcagattccttttcgttttatgttggaaaactctatatcctaattctatattgctagcaataacaatttcatatgtactattgttcaaatccccatatctttcactctatgttcacatagaggtcacatccaccttttatagtatatgtatcgaagctgttcctccctaatttataagacattccccagtgtctttgaatagcttccatccctaattaaattgacataaattgtccccttcccttgaccatcttataaatgatggtcttattttttgtttgctttatcttttattccgctatttgtgggcaataaacgcccgattggttaaggctaataatcaacaggggatgaacaaaaaacactcattaaattttcattttatttaaaactccctctctctttcactctatattcacacagaggtcacatctatcttttatagtatatgtattgaagttgttcctccctaatttataagacattccccagtgtcttaaagcagcttccatccctaattaaattgacataaattgtccccttccttgaccatcttataaatgatggtcttattttttgtctttctatcttttatttaaaacttccactctctttcactctatgttcacacagaggtcacatctaccttttatagtatatgtatcgaagttgttcctccctaatttataagacattccccagtgtctttgaacagcttccatccctaattaaattgacataaattgtccccttccttgaccatcttataaatgatggtcttatttttttgtctttctatcttttatttaaaactccctctctctttcaccctatgttcacatgagagtcacacctaccttttatagtatatgtattgaagttgttcctccctaatttataagacattccccagtgtcttaaagcaacttccatccctaattaaattgacataaattgtccccttccctagaccatcctatgtgatggtctattttattttccaaacacaaaatcagtctatctacacctaaaaaccaaaaattcagaaaatattgttaaattagggattttttcggtataattgctttagaaagaaatttcgcaaaaacaaaagggggattttattgaaacaaacaaaagcaatcttaatcgcattatttctaggtctagttgttggactcactctaaatttagctgctccatctatctttgagccactaaatcaatatgtgttcaacccaattggtcaattatttattcgacttattaaaatgctagttgttcctgttgtgtttatttctatcgtacttggtgctgccggccttggagatccgaaacaacttggaagaatcggtttaaaatcaatttcattctttctcgtaacaactgcggttgccatctctatagcggttacatttgcacttattataaaaccaggagctggcggtaattttaaaacagaaggtcttaagtatgaaggtgcaaaaactgaaacatctttcgttgacacattgctaaatatcgtaccagataacccagcaaaagcgatggctgacggaaacatgttacaaatcattgcctttgccgtattgattggactcggtatagctattttaggaaaacgagttcaaggtatccattcattacttgaacagggcaacgaattaatgatgtatcttgttaatctcgttatgaaattagccccaattggaacattcggtttgctcgcttcatccgttggtaaaatggggcttgcaggcgtcgctgcgatgttcaagtatatgattgtcgttatgttagtactcattattcacggggtctttgtatatggtggcttattaaagatattagcaaaagaaagtattgttcgtttctttaaacatttcgggccagtaatggcaattggatttagtacatctagctctaatgcatcgcttccatttgcaatgaaaacagcacaagataagcttggcgttccaaaagcgataagctcatttgtacaaccactaggggcaactattaatatggatggtactgccattatgcaaggagtagccactgtatttatcgctcaagtatacggagttgaacttacattaccgcaattagctatggtcgtattaactgctgtactcgctagtatcggtactgctggtgtacctggtgttggacttgtaatgcttacaatggttttaaatcaagtaaatctaccagtagaaggtatcgctttaattatcggtattgaccgtattctagatatgtctagaacagctgtaaacatttctggcgatgcaatttgcgcaatgattgtcgcaaaatcagaagaaaaatataatacggatcaatcggcagcatcgtaaatcaaaaaaggagtgaattaattcactccttttttgatttactcccttttttagaacgatattctttccctttattatcattaccagtttcaaattcagtgctaaattcctgattaaactggccggactttggtgatccttgattaccgctccctttactaccgttacgattcgtcatatttctccctcccttccttgtattagtagtatggcgctctatcttttttcatacacattttattttttaacatctattacacacgaaagaagacctcccatatataaggaagaccttctatttcatcacgtaagcgttttcttatttataatcacttaaataagttttttggaaattgaaatcattacattcatttcatcttctgaaagtgcagagaatctttcttgtaagtattgttttttcgcatcttccattttcgcaactaaatctttcccttgttctgtaatctctaaatacacaactcggcgatctgatgtagaacgtgaacgagttacaaaacctttattaattaatttttctgtaacagctgtaatatgactattcgacacatttaattcatttgctacacgcgataccatttctttattcgtacgatttaatattctcagaacgatgaattcattccacggtatgtaaccaccgaatatttttccgatatcattacgcaatgtgcgaaacatagcaaacacatttgtcgatagttcttccattaattgctctcgattttgagacaacattgacagctccttttatttcatttagttaaataaaaaccttattaataattttacatgaaatcttactttttgtcatcttattttcccataattcgtagttttttaatatgtatttcatgataaaatgaagtcaacttccagaaaaagggggattttaatgcgtgaggaggagaggttctcaaatctcagccaaaaagataaaataataattattaagtgacaagaaagagtaagaatacaagcttttctatataaaaattggtacaatgaaagcaaatcttactaaagaggtgttaattatgaacttacaacaatgggctgataaaggtatgtcctttgatacatatgtgaatgaaatgcaagtaaaccaatacgagctactacacatttacaataattttttaattccaaatgaattacttcctgtattagaagaacgtcaaaatgatggctggcgtgttatcgtattaactgctgattggtgtggcgatgctcttttatgcgtacctgttatgaaacgaatttctgaagttgcaaatattgatatgcgtttattaattcgcgatgaaaacttagaattaatggatcaatatttaacaaatggaacagcacgtgcgattccaatctttattttcattgataaagatggaaatgaacaagccgtctttggaccacgcgctccaaaagtacaagaattagtaacttcaatgcgcgctacattacctgaaaaagaagatccaacatttgaagaaacacaaaaagaaatgtatgctaatttccgtgctacattagctgatgatacttctctttgggaacatgtaatggaaaacatgatagaaaaattagtaaaataaaaacctgccgagctcggcaggtttttattttacataatgaagaaatagaataccgcagctaaaatgaaacgataataagcgaacggtgttagttttacacgagctaataattttaagaatgagacaattgcaagcatcgcaacaacgaatgcagttacaaatcctgttgcaaatagcgttacatctgccgagcttaatacatgccagcttttaattaaatctaatccagttgcagctaccatcatcggtactgctaaaatgaacgtatattcagctgccgctgtatgcgacacgcgagctaataaaccaccacttattgtagaaccagaacgagaaaatcctggccaaagtgctaaacattggaacattccaattgtaaatgcttgcttatatgtgatttcatctaacgttcttgctgtacttggttttgaaaacttctcagcaacaatcattaaaataccaccagctactaaactaatgacaactggtcctggaccaaataaaacctttttaattgcactatggaataatacaccgagtaccccggcaggaatcatcccaataataatatgtaataaatttaacgatggcccttcttttactttcccaattccaactaacgaccataatcgtttccaaaatacaactacaaccgctaaaatcgatcccaattggattacaacttcaaaaacttttgctctctcgtcttcaaatccaattaaatgtcctgttaaaatcatatgtcctgttgatgatactggtagaaactctgttaacccttcaacagcacccatgattaaaccaattaaccaatcagccacaagtagtgcctccttaataacaaataatatgtaattttttcacaccttatcataataccttatcccttttcaaagtgcatcctttttttattggcttcatatgttgtaggcgcgtatttcttttctaatctttgattaaattgtatgatagtaagagtttgtttttttatacggaaaggggattttatgaaagaaactacttcattctcacaaaagttaaagcaatttgtattactattttttccgattttcgtaacgcaaatgtcattatttgcgatgagctttttcgatacaacaatgtcaggacatgcaagcccaactgatttagcaggtgtcgcaattggaacaagtatatggattccagttagtactgggttaacaggaattttaatggccacgactcccattgttgcacagctcgttggatccaagaaaaaagaggacgttccccacgttgtcatacaagcagtttatttagcaatttgtgctagtttcgttgttatcctcatcggtttcttcgtcgtttcacctattttaaacggcatgcgcttagaagaacctgtggaacgtattgcagctcaatttttaagtattatcgcaataggaattatacctttattcacttacacggttttacgtggatttattgatgcattaggaaaaactcgaacaacgatgattattacattactatcattaccaattaacgtaatattaaattacttattaatctttggtaacttcggtttcccaaaacttggtggtgttggagcggcaattgcttccactgcaacatattggtgcattttaattattacagtcattattattcagacgaaagagccttttgcctctttcaacattttcaaacaattataccgcccttctctttcgagttggacagcattcttaaagcttggcgtccctataggatttgctatcttttttgaaatgagtattttcgctgcggtaacgcttatgatgagtaattttagtacgacaactattgcagctcaccaagcagctatgaactttgcttccttgttatatatgactccgctaagtttagcaatggcaatgactattgcggtcggattcgaagttggtgcaaaacgtttcgataatgcaaaacaatacggactgattggaattggattagcccttacctttgctttattatattcgattcttctctacttctttgatgatcaaattgcttctatttatacgacagatgcaaaagttcatcatttagcaaaagaatttcttatctttgcgattttatttcaaatttcagatgcaattgcaacccctgtacaaggagctctgcgtggttataaagatgtaaatgtcgctctaattatgactttaattgcttattggataataggtctaccactaggttatatattagcaacgtatacagaatgggccgcaaaaggctattggatcggtcttattatcggtctagcatttggcgctgccttcctacttatccgtctctttcaagtacaacgaaaatatacaacacaaaacagccgctaataataaagcggctgttttctttatgcatattttttcttgtaacgtataatataatgaaaaaggaaggtgggtacatatggacgacaaagaaaaaaagcaatcattcgatgaagaatttgcccctgaaatttcacctggatatcggcaagatgtacataagccacctaaatataaaaacacttcgtttttaatgggcattaccattttcgctgctgtattactcatacttatcattttcgtttatttttgatgaaaggtggcctattatatgaagaaacaagattccaatcgttcaaaaagaactgttaaaacacaaaaaggatatgcaggagattctgttcatacccttaaacaagtcgagcaaggaaatttatatattgctcaaaaagaacttggtcaacaaaatgaaaatctttaaaggccctttattccttgagggcctttttattccgcattaagtagtacacaccccaaaatgttctattgagcaatgaatttcctttattgtacgcgctgcttttgttctagcaccataaatatattattaacctttacaattttcacttcataattcaatttcatttcgcttctcttaccattttcagtacccgcaacgtacgctacagcttgataaagaaaactctcatcggtctcttcacgtatctcctcgtttgtaaatttatactctaaatctcgaaaacgatttggataataatttcccattaattgttcataccctctatttaaaaatagttcttcaccttttcgtttcacatcttctttattagtagacccaaacactgatagttgctcggtcacaaaatgctctcctacctttttcatttcattatgagttaaattttctatacttttgttctttaactccttatttaactcgtactgatcaatcggtttaaaggtagcaaaaacctcctctttatatgaccataacaatataaaagcgatacatagagaactgattaacagtctttttttcgtaatactcccgcccttcttaataatgatagctatattttaacatatagaaagaaaattctgatatcataaagtggaataacttaacttagaaacgaggaacaattatggactcttacaaacattatataaaagaagctttgcctaatctttctatacattcatataaacaaaatgaagaaggatgggataatgtagcagttatagtaaatgatgagctattgtttcgtttcccgcgaaaacaggaatatgcgatgcgaattccgttagaaaaagaactatgcgcaattctcactcaatcactacaagaaatcgaagttccacaatatcacctaatttataaaaatgaatctgatgaggttcctctttgtagttactatactctcattcatggtgaaccattaaaaacagacacagttgccacgctggaggatccagagctgaaagcaattattacacaattagctactttccttgcggtactacatagcattcctttacaccaagttacaacgctatgtttccctattgaaaaaacatgtacctactggaaagagctacaaacaaaattaaaccaatatctcactactagccttacttcattacagaaactagccttaaatcgcttatttgaaaatttctttgcatgtttagctatatccacttttcaaaacacaatcattcacactgattttactcatcatcacattttatttaacaagcataacaaaagtatttcaggtgttatcgattttggtgatgcgcaaattggcgatcctgcttttgattttgcaggactatattatgatttcggacatgagtttactacatctgtatatgaacagtacagtacacttatttctcatcatgatccattactcattcatcgcattactatcttctatcaatacagtcctttactacataatattatttataactttgagtcagagaataaactcgaattcattacaggcacagaacagctaaaaacgatattacagggatgagattacattctctccctatatactctctcctcatacaacattaactttttatccatttcaacaatgactttatacaattgaaatgcctgtaaaatttgcagttgaatttcaaaaggagcattttgttcttttaaccattgaaatactttcgtttcatctttcattgattattcctccctttatcctgctattcgcgggtagcccgattaatgagggctgataatcagtgggggattgacaaaacccccactgattaaagattcactttattaaaatctgctataaatatacggtaaatgatgaaaagcttttcatgtcaacaacaaaaaaggatgcaaagttgcatcctttaatgtacgatatttttcttctgctccgcttctttctttacttcttccccttggcattcactacgaaatgcacaacttatacactcagaacgaaaatgacgctctgtataatgctcaggttgttgcaacatttctttcattctagataaatcagccattccagttataatatcttcctgttttggaatgtactcatacttagttccttctattaaattaataacttcaatctttcctggaagaacgccgaaagctttataactaaatactgtcattagcttctgacaaagagcaagcatttcctcatccgcatcgacgacatactttttaattacaaacgacccagcactccactcaccaacttcaaatgtcaatgacatgtggacacctaactcttccatatatgtttgaaacttctcgtataaaaacaatggtggtgtctgactatcatccttttcaacaaactgtaataagtgatccgttagcttagctaatacaatatagtactccgtcttcgaagcaaacatattaatccttacttttttccaatacttttctattaatattaaaagtacaattttcgtttgttgacccgcaggtagcgtgtaatactcgttaataatttgattgacaatcatttgtgctatttgttgccattcaaatgaagaaggttctcttctttttatatgacgaaaataaaatttatgcggacaacgcataaaatcatacaaatgataatctgtcatcgttttgattgagattttctcatgcacttgctcttcatctcccttctgccattaagaaaggtgttttacaaattcagctccaaactgtaaacatttttctacatcttcatcttctggcgttaattctacttttagtccttctaacacaactgctgccccgcgctcttgtagcttttctattaaaatgtcaactgccactccgtatttcggataagctgaatcacacgatccgaatactgccgcttttttcccagttaaatcaatagaatccattgcatcataaaaatctaagaaatcatcaggaagatcaccatctccccaagtatatgcacctaaaataattccatcatactgttctaatatagaagcttctggtgaatccataatatcaataacttcaatttcattttctgtttcacgaattacgccggcaatgtggtcagccatttcctctgtatttccactcatacttgcaaaaatcattactaacttactcaactgaacctctccctttactttgtatctctttttctgtttgaatgctcttcttctcatctacatattcagaccgaattacatttctttgccattccatatgctgatcaacatctttatttttatttttatcttttaatcccctccgcagaaggtgaaaattttttctcattaacatgtcgcatccatcctattgataataattatcaatttcaactacttttagattaattgacattgattatcagtgtcaacaactatttttaaaaaaatgattaaaatgtacaagcttgtccgttagctattcatatactatgaatgagcatagttctttctcagccctctctgacggaaagaaataaaagcaactgcaatagagtgcagttgcctttttttgtttttctatgattttagtaatcttatagtcgtctctaaaaatagctccactccacaaattaatgctgattcatccacgtcaaatttcggatgatgatgtggataacaagtatatatattttcattacctgttcctaatttaatgaaacaaccgggtgcttttcttaaatatgctgaaaaatcttccccacccatagaaggttcaagcttcacaacacgctcattcccaaacaaatgtagtgcactttcttctactattttcgtaatatattcatcattaataaccggatcatatccatatcgatacgtatatgtatacgatcctccatgtgcttctgtaattcctttcacaattttctcgattttcccttctgcttccaccctcaatgcttgattaaatgaacgaacggttcccattaaagttgctgtactaggaataatattgtcagccgttcccccatgaaattgtgtaactgaaataaccctttgcataaaagcactcgtatttcttgatacgatatgttgtaaatttgtaataatctgtgctccgatagcaatagggtctatcgtttcttctggtcgcgccgcatgtcctcctttgccttgaatttcaactgtaaatacgtctggtgccgccatcatcggcccatacacaattcctatctttccgctttctaatccagacataacatgtaaacctattacataatcaacaccgtccattacacctgcctcaaccatttcttgtcccccaccgggatacacctcttctgcgtgctgaaagaatagacgaatctcacctgcaaaatcttcctttatatttgatagcacctctgctgtgcttaataaaatagctgtgtgagcatcgtgcccacatgcatgcatcattcctttattcacagatgtataagatttacttgtctcctcttgaattggcaaagcatctatatcagctcgaatcgcaattactttcccttgcttcacacctcttttaattgctagtacactatacttcgtcggtctcgttacttcaaaagaagaaaatgagcataatgtatcatatataaattgcgaagtttctttttcatgaaatgataattccggatacttatggaagtgccttctccatttcacgatattttcttccgaaattagattcttccacactctattcatgataatttcctccttttcaaaagaactagaaatttaaaagtttactccgtcttgaatgattaataaaaacaaatactgtatttttacgtattcttatagtccacttttatgtattcacacaatccactttctatttacatgtcaaacccattacaaattcatgctgaatgtaatataattgctaagttagggattttcttttttagtatttagtgctaatatcaaaaaagagccttttgacttatttttacctaaaatgtgggattttgtttttttcacaataatgtaggacatgatacctacaaagagctattatttcattaagagagggaaagacatggaaagattaaaagagatatggtctcgaccactcacacaatgggttgcaaagacggtttattatcttgcaattttatttgcattactttggttgtatggattccatgatacaaacacaagtacatttatttacaatgaattctagggtgggaacgttatgaagttattagaacaaattgaaaagtgggctgcagaaacgcctgatcaaaccgcttttgtttggcgagatgcgaaaattacgtacaaacaattaaaggaagattctgatgcgttagcacattggatttcttctgagtatccagacgatcgttcaccaattatggtgtatggccatatgcaacctgaaatgattgttaactttttaggatgtgtaaaagctggacatgcttacattcctgtagatttatctatcccagctgatcgtgtacaacgtattgctgaaaattctggtgcgaaattacttttatcggcaacagcagtaactgtaactgatttaccagttcgcatcgtaagtgaagacaacttaaaagatattttctttactcataaagggaacactccaaatcctgaacatgcggtaaaaggtgatgagaacttctacattatttacacatcaggaagcacaggtaatccgaaaggggttcagattacttataactgccttgttagctttacaaaatgggctgtagaagatttcaacttacaaacagggcaagtattcttaaatcaagcacctttctcattcgatttatctgtaatggatatttacccatcattagtaacaggtggtacactttgggcaatcgataaagatatgattgcgcgtccaaaagacttgtttgcttctttagagcaatcggatattcaagtatggacttcgacaccttctttcgctgaaatgtgtttaatggaagcatccttctctgaaagtatgctaccgaacatgaaaacattcttattctgcggtgaagtgttaccaaatgaagtggctagaaaattaattgagcgtttcccaaaagcaacaattatgaatacttacggtccaacagaagctactgtcgctgtaacaggtattcacgttacagaagaagtgcttaatcaatacaaatcacttccagttggctattgtaaatcagactgtcgccttcttattatgaaagaagatggcacgattgcacctgatggtgaaaaaggtgaaatcgtaattgtcggtccaagcgtaagcgttggatatttaggaagccctgaattaacagaaaaagcatttactatgattgacggtgagcgcgcctataaaacaggcgatgctggctatgttgaaaatggtcttctattctataatggtcgtcttgatttccaaattaagttgcatggttatcgaatggaattagaagaaattgagcatcaccttcgtgcgtgttcttacgtagaaggagcagttatcgttccaattaaaaaaggtgagaaatacgattatttattagcggttgttgttcctggggagcattcgtttgaaaaagaattcaaattaacatctgcaatcaaaaaagaactcaatgagcgattaccaaactacatgattccacgtaaattcatgtatcaatcttctattccaatgacaccaaatggaaaggtagatcgcaaaaaattattgagtgaggttacagcatgaccgcatatggatcattttattttttcgctatagtgggcattttattaatacctactatcatagctggattaaaaggtaaaatgttgcgtaaatataatgccgttttaacattaatcatgcttgctattatcttctcagataaaccaaagcaagcaatgatgttagccgcatttattatttggcaatatgccctaattaaaggctatttaattttaagaaaaaaaaataatagtacattcacattttgcatagctgttattttatcgattttgcctcttattttggcaaaaatcgcaccatttgcatcgttactacctgagttaaaacttgttgtttttctaggtatatcttacgtaacattcagagcagttcaaatggtatttgaagttcgtgatggtttaattaaagagctttctttctttaacttctgggaattcgttttatttttccctgcgatttcaacaggacctatcgatcgttaccgtagattccaaaaagatattcaaaagccacctagcgctgaagaatatcaaaatttactatatacaggactaaatcgtattttccaaggtttcttgtataaatttattattgcttacttaataaagcaatattgtatggatccagcattcgctcaacacgatacaatcttttcaaatatgatttacatgtatagctatagcttatatctattctttgattttgctggttatagctcttttgtaattggtgtaagttatatgatgggaattaaaacgccagaaaactttaataagccattccttagtcgtaatattaaagacttctggaaccgctggcacatgagtttatcattctggttccgtgacttcatctacatgcgtttcgtattttttgcaacgaagaaaaagttaattaagaaccgttacacaatttcgtatatcggtgcatttttaaacttcttcattatgggaatttggcatatccaaggaagcgctgttgcgcagtatattatttatggtctatatcatgccgcactgtttattttattcgatattttcgaacgaaaaaacaagaagcataaattttggccaaacaataaattcacacgcatccttgcgattgtaattacgttccacattgtatgtttcggtttcctaatcttctctggacaccttaacagatacttttaatgcacccttcttattccattaagaagttgcacatataatatatttcggatataaaggagattttaaaaatggcagaattcaaagagcaagtattagatattttagaagaagtatgtgaaaacgatattgtgaaagaaaacttagatgttcaattatttgaagaaggtattcttgattcttttgctgtagtatctttattagttgaattccaagagcgtttagatattgaagtttctatttctgattttgaccgtgacgagtgggctacaccaaacatggttattaaaaagttggaagaaatccgatgaacaaagcaaaatttggtccgatgcttttagcattggccctttttgctgtattcttacttattccaacgcgcttcctacttccacttttaagtgatgaaaaagtagaacaagctgctacttctttaaaagaagaaaaaattcaaagtatgattttacagcaaaagatgttagcagatccaaaatatcttccgatgtacggttcatcggaattcgcacgtatggatgctttccatccatctaattattttaaagtaaagcctgaaggatttacgccattccttcttggacgcggcggaacacaagaccttgtacatgtgttaaacttcgcatctacaatggatcaattgaaagataagaaaatggtattcgttctttctccgcaatggtttgtaccacaaggtattgatgaaacgcactttgcacctaacttttcaaaacaacaaggttaccacttcattttcaacaatgatttaaaacctgaaatgaaaaaacaaattgcaaagcgtttattaaactttgagattgtaaaaaaagaaactttattaaaaatctcgcttgaaggcatcgcttatgatgatacgaagtataaagtaaaagcacttgctgctaaacctttcgcttatatttaccgtaacattttagatcgtaaagatttatttacagctatgtttaatattaaaccgcataaagaaaagcttgacccttcattaaaacaaatgaactgggatgaagctcgtaaacatgcagatcaaacaggtgcagcagaatctggatctaatgaatatggtatcgaagatggttacttcaatagcaaaatcaagaagaaattaaagcaacgtgaaggctacttaaaaaatgatgcttatgatcaatcgccagaatatgaagatttacaaattgtacttgatttattaaaacaatctggtgcaaaaccactcttcatttctgttcctgtcaaaggtccttggtacgactacgctggcttcccgaaagaacgccgcgaagcatactataagaaagttcatgagcaaattgaaaaagctggttatccaattgccgacttctcaaatcatgaatacgataaatacttcttaaaagatcatatgcacttaggttggaaaggctgggtttacatcgacgaagccatccaacaattttataaagcaaactaatgaaaagaccgcttgaattactcaagtggtctttttgtatatattttgtaattgttcgattgcattctctgcttctttcataactcgctccactacatgctgagctgattcgattctagctaatgatgctgcctgtcctgcccaaagtgacatatattcttccttattttgcttcgctgcctcttggcgtattttagaagttaatacgttttgcactggatacatcggcagcccttcttcttttccttcatgtctctctataaattcattccgaataccccgcgcatatttcccagaaaacgcacgagttacagttgtgctcgtatctgtactatgtaaaaccgcttctttatacacatcgtgcgtaatactctcttcacttgttaaaaaggccgatcccatttgaacaccttctgctcctagtgccaatgccgcaacaagcccttgtccgttcattacaccacctgctgcgacaattgggatatgcggaatagcccctactaactgaggtattaacgcaaaagtaccgatcatagcatctcgttctttcccaataaacgttcctctatgccctccggcttcgcttccttgcccgacaataatatctactcctaactcggcaagtactttcgcttccttcacatgggtagctgttccgataacttttattccacttctttttaaatcatttatttcttctttttctaacgtttgaaatgcaaaactaacgaccggtactttttcatctaataacacttgtaattgttccttatagctttttggaagttttaacgtcccttctacttctatacctaattctctatttactccacttagtaatactttcgcctcatttaccttctcttcttctatttgtatctctttcgttacaagtaaattaacactgaaaggcttatctgttagttctcttattctataaatcgcttcacgaatttgttctgggctcatatagcccgctccaagcgtccctaatcctccgctattacttactgctgcaacaagttctggcgtcgtaatcgcgcctgccataccggcttgaacaacgggatactcaatttttaatatgtctgttactcgacttgtaaacatcatttcccctcctatttcctttatatcttctttatttgataagctttcccctgcttttgcaagggttgaacttcatatgaagcgaatatattgaaagagaaggaggctgagcttaatgatttatccaaatgcattaaaacaaggtgatacagtaatgatcattgcaccatctggtccacctacaatcgaaaatgtattacaaggtgtgaatgtattacaagagatggggttatccgtaataatcgggaagagcgtttacgagaaatatggatttttagccggaagtgatcaagttcggcttgacgatatacatgaagcatttacaaataatgaagtgaaggccgttttctgtgcacgaggtggttacggaagtgctcgtctcctccctcacattcaatatgaaatcattcggcaaaaccctaaaatcttttggggatatagcgatattacagctttacatactgctgtttcacgttatgcaaagcttataacatttcatggtccgatgattgaagaactaggaaaaggtattgattccctatctttatcctctttcaatcagctattccatccgtattcaaccattttatctgcatcagaatgtatcgtatctagctctcacagtacagttacaggtacgttagttggaggaaatttagctgtgttaacaagtataattggctcgccctacgagataaatacggacaatacacttttattacttgaagacattggtgaagaaccgtaccgcattgaccgtatgttaaatcagctacttttatctggaaagtttaatgaatgtaggggcgttattttcacaagttgtcacgactgcactccttcaaagccatctcaatcattgcaagcaatattatatgaatatttcgcaccatatcatataccggtcctattcggtttaccaattggacatataagtccaaacatcggtattccacttggagctacagcgacaataaacacgaataataaaacagtctctatttcttccggtatagccactccatattcaaattaaaaaggaaaagcgattacgcttttccttttacttataataattaaaaattcgtccagatgagatatctgcaatttcttctggaataaatgttttacttatatcagtaccaacatttaatacagctgtagcatctttctcaatgctaccaaataactctttcccacgtatcgtaataaggggcgttccttctggcaacacatcttttacaaattccatttgtgtaaagaacggaacgatccatctaccttctccttggaaatgacgcaaacgaagtattccctctgttgccccgtcctctgcttctagtgaaccagcaacataaaactcagtaaataagagcaattcataaaattccttttgcttctgtttatcatcccctgctacaacaagtacctcttctaatttctttactgaaatttgctccatatgatgccacccctattttcaaaatgattgtacttagattatacgaaatattcttatttttttctacataatttgcaattattttcttaaaataattttaatacttcttttgtcgtcacaatcgtagcaaactcttcatgtaaatttacaagtgtcatattgtgaatatcttctgcactatactccttaccatctaaacctttacggttaaaagtagccgttgcatcactcactaaatatgttgtaaatcctaaattccctgccattcgtgttgtagtttccacgcaatgatttgtcgttaatcctacaaccactactgcattacatttgttctttcttaattgctcttctaaatttgtcccaatgaacgcgctgttaacgaatttctgaataaccacttcaccaagtagtggttgcacttcttctttaaagtttaccgtttccgctctctcataaaacattgactgagcattttctttatttacatgctgaatatgaaaaactggtcgtttcctttttctccattcttctaacaaaattctcatgttttcttcagcaaaaatattatttctctcgccccaatctggtaattgaaatgccttttgtacatcgattatgataagtgctatttgatttgtcatcatttcccccttaatttggctgtaattgaaatagaaaaccaagttgttgtgacgcagtaataaagcaaacataggcgcaaagctctacaatttctttttctgtccaatattgttttaatacgtgaaacatagtatcatctattgcttttcggtcatgaacaaatgtatgcgcaaaagtaacggctacaccaatctcctctgccttttgcatatcatcaggtcttccttttgccatacagtacggacattcattcccatacgctaatgttcttctcacttgctccttcaactctgctgaaagagttcctttattgtacagtgtatcttctaacgtactccacgaatgtaatatatccgaattatgccctaataacttttgaaactttgtatctcctacatttgataatgaaattctctccatcatttcccctcctatttccttctgttttattgtaaaataaataacgttcactttacatttcatatgaatcttaatttatattttccctttacaaaaatcattattttactggaggtatatttacaaatgcaattagaccgtgttgatcgaaaaattttaaatgaattatataatgatagtcgcctttcgatgcgtgaattggcgaaacgagtaaacttatctgctccatctacttcagaacgtgttcgtaagctcgaaagcgaaggtgttattcaaaaatacacaatcgatattgattataaaaaagcaggactcgttttagattgtattttagaaatcactttaaaaaatggtgatacaacacgtatgcaacagtttattcaatcttatccatctgcaagtttttgttaccgagtaacaggaagcttatgctacattgtaaaaatttctgttccttcactcgttgaactggaagaatttatcaatgatgtttcttcatatgcaacgaccgtttctcatatcgtattatcagaagtatctcttactcctgatattgaacatatcttcccagaagattaatttatttttattcataaaatataaaaaaaccccttacaataagaataaaaataatatattatgtattaaaatacataaagttcgagaaaggggctttacattgaaaatctggttttatgaaaaaacggcacaattagatgacttgcttggtatttgggacaatgttccgaccatcccacgaattggtgaaaaagtggagattttaaagacggtccgcactgttacagatattaaatatgtaaagaacggtaataattttcgtgtagaaattattacaaattaaaaagtagctcctaaggagctactttttaattatctattatgtgctttctttataacgattttatcttcttctacagatactgttacataatcattttcttctaaccgaagcttatttacagcctcatctggtaactctatggccatcaatctatcggttacgatcacttgactatacacttcattttcttgtgatgaactcactactttttgctcatttataaaacgtactcgtggcacgccaacttcttttactgtacgccattgtttccaaacataaggaattaaccaaagtaatccaacaactgtaagaccaataccaatccataaattactttgcgcttgtaattcagtaattgagattgtaccactttcttctccaccgaaaaattgcatacttgttgcaatctaagtgaattttatgtaataaaaatccccgtttttacaagcggggatttcttttattataatacgtcacgtttttggaataatgcacttgatgctacaagtaacacaacaaagtatgcaactacaagtaataatgaagttgtaaacgtaaattctgtaaatgttggttccattccaccattgattaatttattactatcgtaagctcttaaatccaaatggttgaatactacaaacttcgctacaccttttgcaaacattattaataccatattaattgcaccttgtaagaagaataggaacatcgtaataattaatggtaatacagattttctaaagacatttgctaggaaaaatgcaagtgttgcaaaaaagaacggtgaaagtagttgatataaagttgacttcattacgattcctaacgttaattctgttttactaccatccattacaataccgccaataatcattgcaattagcataccagctaatacgataaataacattgctaataacactgtaatatatttagaaaataaaactgcaagtctttttcttggacggattaacaattgtttaattgtacctttttggaactcatcagtaagagtacgggcagcaagtgtaatcccaaaaatcgttgtaaataaaacaattaagccaatctctgagtttgcataatctaaatatgcccccttaaactcatcaccttttccccacttcaacattgctaaagtacctaaaatttcgagtgccgcaatgacaccaattaaaatatacataccttttttcgcatgcaactttaaaaattcattttgaattaatttaaacattacgctttcactcccccagtaatcgctaagaactcatcctctaaagttttattttgaacagtaacgccatatacaagcacatcagcatgaacaagtttttttacaagttgcggaatgttgtcttttgttacagatgctacaattacattcccttttgctttgcctttaatgatttcatttgctttctgaacttcatctacttcaaacgctacaacgactgcctcatcatgtttcactttttcatgtaagttgtactcttgtacaaactcaccttgtttaataataacaacgcgatcacacattaattcaatttcactcaataagtgacttgatacgattacagcaatattctcttctttcgctaaacgttgtaaataatcacgaatttggcgaataccagctggatctaatccatttgtcggctcatctaaaattaagattttcggctgatgaagtaatgcctgtgcaattcctaaacgttgtttcataccaagtgaatatgttttcacctttttatgaatcgcatgctctaattcaacaagctttacaatctcagcaatgcgctctttactaattggtgtaatggccatattcgcaaaatgctttaagttttgcattcctgtcatataatcatatagttcaggattttctacaatcgctccaatttgctctagtgccttttcacgctccgagcgaatactatgtccacaaattgtaatatcgccctctgtcattgaaataagacctgtcatcatacggatcgtcgtcgtcttaccgctaccgttcggcccaaggaatccgtatacttctccttcacgaacctcaaatgataaaccacgaataatttccgttccaccaatcctttttcgaacattctctaactttactactacgtttcccaatgctgattcctcctttagacttctagttttttatcgataatataagcaattacatatattattagagcactaaccattaccatgaaacttatattaaaaatgttaaatccattttcttgaaacatattaataaacagactcttgctttcactatgatattctactcttcgcaatacttggaaagctggagctaattttcctagcaaggttgtcgctaaagtaatcgctatatttattactagaaaaataataacgatcagtatattttgcgcctttttctttttggtaagtaacttaactagagtaattactaatatgatttgtaacacactaaacaaaaactcaaataaatcgcttatcgtatatattaaattattaattatgcctacttgcataatctcttttgcctctacatatacagaagtcgtaggaaaagctaatacataacttacgtagaaaagaattccacatatcccataccatatagccattgcgataaatgagaaaataagcatagaaattacatattgtttcccagatattgctgtaagtcgtaacattggattagttagtaagcgtgaatatgatttcattgtttgtataaacatataaacaatataaaagaaaaatataatcataatgattccaaatataccctcttgtctactgatagccgcatcactttttcttacaatcatttgtgaaaataacacagcttcaattagcacaaagaataaaaaagtaacaatatatcttttcttatttacattccataaataggaaagtactgacttcacttactaaacacctccttaaacaattcatgaactgcttttcctctctgaaaacgaatttcttctacattttcatatagaaccatttctccatcttttaaaaagatcacttcatcaaaaatattttcaatttcatttattaagtgagtggaaattaatatcgtacaatcttccctatagaactgtagaattaaatccaatacatgttctctagaaagaggatctatcccgcccaacggctcatccagtacgtatagcttcgcttttcgagaaaatgttaaaatgatttgcagcttctctatcataccttttgacaatgctgtaattttttcttctaacggtattttaaattctgcaatcgtatctaccgctttttgaatatcgaagtctttataaaaatctcggtaaaaaaataaagcatcttttacagtcatccaatcatcaaagactggcttatcggacataaatgaaacgatttctttcgtctgtaatcctacctttttaccgtctattgtaatactaccttcagaagggtgttgcaagcctgcaatcattttcaataacgtcgttttcccgctcccgttatctccaacaagcccaacgattttcccttccgtaatctctatgtttaattcacggatcactgcttttaatccgtatctcttccataagttttctattttcaatagctctgtcattggctctcctccctcttatcatgtaatgaagaacgaagaattgtaagaatttcttcttctgaaaaacctaaattgtccattccatctataaaagaatgaagtaattctttcgccatctcttttcgcagctccataattttctccccttcattcgttacataccgtcccattcctctacgtgtgacaacaactccatcccgttctagctcttgaaatgtacgctgaatcgtatttggattcacttgtaattcactcgctaattcacggacagagggaattttatcaccaggcaataaatgtcctgttacgatctctttttttatgcattccattacctgaatgtaaattggtgtatttggagaaaactctattttcatttcttccctccttttgtatcggtgtactagttaaataatacactgatacaaaaggtttgtaaatacccatttaattacaaaaaagttctatccgttaaccgaatagaacttcccaaatataaatcgctatacaaaaataatagtgttatgtaaacaaaattataaagaaaagctgtcttatcaatcaataagacagcttttccttataatcctatattaaaagttaaacacgaagtcatcgtcagctaacttttcaacgttcgttgcttttacgtaaccatttccttttacagagaagaaatcatggtttttcgtatctgtacgtaaaccatttaaaacgattgggttaatttcttcttcttcaaacttcggctcaagtcctaagttcataagccctttatttgcattgtaacgaacgaaacgatttacatcttctacaagaccgatagaagtgtaaatttcttctgtataggccatttcaatttcatatagttccattaataactcttgtgtttctttttgcacttcttgttgctcttctacagaaagttctgcgaagatttgttgtgctaaaataccgacgaatacgccgtgaattgactcatcctttaccttcacataagttcgctactcctatgccgtttatacagcttacagtttcctgtaagaagagactatatcatctaccttctcaggtagccctccatttcgatttaagggattctcacccaccgcttggccctactcctcttgcggaatttcaccgccattgggatagtcgttgaacgttcctttatctacgtatcgcacccaccactgtttatacagttttcgatgtctgatacttccgtacatgttatcgctagataaaggcttcgctgctgattgccctatcagctattctcctttccatctattgatagttagagaataacctgaatgcatatattcatcaataataatacagataaatttacactagggggtcccagcaattaaaagggtttttcaattggtatctctaccaaaagccgccataagttaacggataataaggttaataatttcaccacttgccgtcagtttaccttgaccagctaagtaaagtggatagaaaaatccactatagaataagtaactttctaagaacacacttgctaccattgccatgtataactcttttttcgttacttcaggctttaataaacgacgatagtaactagtaataataccagcttttttctcaagtaacggatgattgtctacccagtcaaaaatatcatcaatttcttcttctgtagctaatgttgtgaaaatgtgactataacttttcgcatgtacttcttccatagctcccatgaaagctaatacacttttcgcttgtaaattttcaagatgaacaagtacaagtggcattccttcgccaccttgtttcgtatctaaaagtgttaaaccacctaatacacgcttataagcaatttgctcttctttcgataattgcacccaagtatttttgtcagacgaaaccgcgatttcttcttctgtccaaaactgagcgatgttttgcttccaaaacattaaactgaaatcatcttcctttttattccagttaacagcgcgcattgaatcacccctatatctattattgttctactgaacggttaaatttccatctaacaatgaaaagctaaccgtttagtagaacaaaccaagtatgagcagggttcataaccctgctcatactattgggttattcatttagtatggcaatatgccattaaacggtacaagccacacactcttccacgcttaatttacgtgttctcgtataatacagactctttaagccttttttatgtgcatagatgtagtaacgtgctaattcacgtgttgaaatatcactattaacgtaaagaattgtactaattccttggtcaatatgttcttgaatttctgcgattaaatcaattaatttaaactgattcatatcgtaagaagatttatagtaccagaacgtatcttttgataaatacggcattggataatatgttgtcgcattcgcatatgttcttgattcgatttgacttacgatcggcattacgcttgaagttgcattttgaacgtaactgattgattgtgttggagcaatggcaagacgatatgagttgtataaaccattcttctgcacttgctcttttaaacttgtccaatcttcttttgtcggaatatgaattccttcaaatagttgctgaactttttcagttacaggactgtaatctgtcgtttcatacttttcgaagtatgtgccattcgcataatcagatttatcgaagtctttaaatgtctcgcctttttctgtagcgatttccatacttttctcaatagaatagtaatttaacatcataaagaatgtacgagcgaattctttcgcttctgcactttcataagcgattttattttttgctaaatatccgtgtaagttcattgctccaagtccaactgaatgaagctcgtcatttgcttttttcacagttggtgcattcggaataatcgtcatatcagaaacagctgttaaagcttccattcccgcatgaactgcttcacgaatttctttattttccattacgtttacaatatttaacgatcctaagttacagttaatatcacgacggataatgtcatctgtaccgtaatcatttatttctgaagtttcttgaagctggaagatttctgtacataagttcgacatcttcacagttccaatatccttcaatggatgttgattatttgcatttgatttaaacattaagtatgggtaaccagactcaagctgaatcatagcgattttaataagcatatcacgtgcactaatatctagtggcttcttcttcactttcggattgctcattaattcatcgtacatttcatcaatgtcaatatcatctaaatgcttgccatattctttataaaccgtataaggcgcgaaaacatggaaaggttcgtttttctcagcaagctcaaagaacttacttggaacgataattccgattgatagagactgaatacggctcttctcatcggcatttatttttttggtatcaaggaattcaataatatcccaatggaaaatgtttaaatatactgcaccggcaccttttcgttggccaagctgattcgcatatgaaaacgaatcttcaagcaatttcataacaggtactacgccacttgcagcgttgtcgatacctttaatttgctcaccacgtgcgcgtagcttagataagtttaaagctactcccccgccgatttttgataattgcatcgcagtattaatgttaaagccaattgaatttaagctatcatccatctctaacaagaaacaagacaccatttctcctcttctgcttcttcccgcatttaaaaaggttggtgtcgctggttggtagttttgttttacaatcatgcttgcgaattgtcttgctttcgaaacatcaccgcgtcctaagtataatgaaacaattgctacacgatcttcatagctttctaagtattgtttttgatcattcgtttttaacgcataatctttgtagaacttagatgctgccatataagattggaactcgaagttttcaccataagcgatgttatatacttcctctacttcctccaagctatactcgtccagaacgttgtaatagtaatcatgttctttcatatactccattcgctctgccacgctattaaaaggaacggtattctctctagcttcttccataaagacttctaatgcctctttatctttatgaagctgataaaaaccgtcctgcatttgcgtgatttcattattcagttcaatgtgtcgcaatctcccgcaccctttccttaaaatattctacatcgttatttgttccagataactcaaattttgatacaataggcacttcatatttagtagaaatcttgtcagcacttgcaccgaacatgtctccccagttacgattgccgcttgcagatacgccttttaatttttcattattgcgctctaaaaagtctaaaacacgttctggtacatttccaaaacctgttgtatacgtaataagaataaagtcttcatctattactagatcttcatcaatttgaacggccggcatatttaatttgtgaatgaaacgcttcacgtttcctgtcatagaatcatatgcaactaacatttccgaccctccctctcaaatctatattctctatatgttgttcttgatttctctatatattgtattacgtttcaaaataagacacaagatatatgtataaattctttctttttttaacttttacttttcgacatgatagccgttttttttcaatacaatgactatgaaacaacattctaaaactcatgtcaataaagtgcttttcaaaaaagttgtcaacgaatttaaccttatttttaaaaaagttaacaatatattttgtcataaaacggtagatgctgaagaaatatatttctccagcatcacgcaaaaaagaacagatatgaaactataatctgctctaaaaaacgattacatttatcaaatttaccttattaaatatattatacatatactttcgtttttcgttacatactaaaagataactattatagaaaaagattattattatggaacttcaatttatttatgaaaagtttattcagagtactcaatgcgcaaaatatcttttacaaatatatgatgtggattttcatctttatcaagcattgtacatacaggagcctcttcatcaaagtatacaatcagtccttctacgtactgatatgtatgttgaacttgtacagttactttaatttctattgcttcttcatatgctctttttattttctgaagcatttttgctgaacattttcgtttctctggatacataaccattcccataaatcgattgccggctctatctttccacatataatcccaatgtggtaaaatgccttgtttaaaatcgcccataattcccctctcctttatcttttatttatcccgcatgaaacgtccgtttggtgaaggctactaatcagtgagagatgccctgctgatcaaaattctcctttatgaacgtggcgtttctgaatatgtataaatcacttgcccgcctcgctgtgcgttaccaatgaaatgcttaaagtcttctctatttacaacaacttctctgaacgtataaaatacatctttcgtaacaacatactcctttatttcaccattttttagctgatctaaaattgtatttgctaattctttatccatgtatttcacctctctgcaatattttattttatcttatattctataggtcaacaactgtaaatttatcccgctatttgcaggtagtccgattggtgttgactactaatcagtcgtagaatgaacaaaaaatcttactgattaacgtttcactttatctcgttgttatgccatgattttattttcgttatttcgcaaacaatattgttttactatatgtccactaaatatcatatactaacatagctacttctctatatcaaacatttcggcattcaattatgcaaagttccataccactatgctacaatatacaaatagaactaggagggatactatgattcggaaagcaaaaaagacagatgcaatggcaatagctcctttattgtataatgctctgcatgaaattgctgaaaaaatcacaggtagcacagttgaagcagaagtattactaggacttgagacatggttctcaaaagaaaataaccgtctgagctacgaaaactgttttgtctatgaacaagacgagagtgcagttggaattattgtcgcttatcacggtagtgaagcaacacagcttgacgcaccaattgtacatcacttaagagcattacataaagatgaatcaattacgttagaaaaagaagctgagcttgatgagtattacattgatacattatcagtttcaagtgcacacggcggaaaaggtataggttctaaattaattgaagctgccgaaatctatgcaactgaaaaagggcataaaaaaatcgctttacttgttaatttagaaaacaaacgcgcctattcactatacgaaaagttaggttataaaaaagatgaaattgttatgctagtaggagaaccttatgctcatctcgtaaaaccattaaacgtcaaaatttctatatcttaaaaagaaagcacacgatttatataaatcgtgtgcttttatgttaaatttgtatttaatatatttccatccatcgcctcgtgaaacgtatatgttgtacatccccatggctctctgtgcaaaataggagaaccagaccatcccatcgctctcagttcggcaccaatcattacattcacataattatgacctacaagagctatacttccatgtacgagagcataacgatgtaacaggtaagccgcttgccttaccctctctcttacttccttataagactcaacatctttatggtagccaagtatccataatgttcgtccaatgaacatccataccttaattgtgcatttcaaccacttcggagcaaaaaagcatgaaggaacttcagcttctctaaaaagagaattttgcataaaagataaagaatccgtcaattcagctgctgattgtacagcacgcctttgatcacttgttaagacaaatttcgctgcttcaattgcctctattgtttctatcggcattttagctttttgtatcattgactcggaatcatactgtttcatccattcgtgaaatgaattaattgtcatcggttctcttatacgacttaaacaaccatgacgaataaaagaaatcttcattcttttcactctccattcatcacttatgaactctattatgcactagttctaaacatcataccacgcaagaaaataaagttatatacctttacatctccccaccactatcatgtgttatcgaagcatggataccatccatcccatcaaaatatgtactcgtatcatattgacgaatcttttttaaatgcatataagaaaataaaaataaaattaaagctataacactccccacaaattcaaacatcattttaccgcctctaatttctcccacttcagcaggttattctactttttcattatacctcgatataaagattcttgcatttttgctattttttctaaaaaacatggattttctacatattttcttacaaaaagtgaatatttttcgaatttttactttggaaacatttacaaagtaggaaatatggttcaaaataggaggaaataaaaaaacccaaatttattctttttttgggaaaactgtaacaaggagagttgcttatgcagatcgcagaaactggagatatcatcgaatttaaaggtggaatgcaaggccgtgttcaaaaagtaaatcaaaactctgttattgttgatataacaattatgaagaattttagagaactagatatggaacctcttacagttgtaagtcataaaaactatactgtcattaatcaaaatgcataatataatagaaagaaagggcctgtatagtatacaggccctttctttctattaacgattatcaattgtttccggatatagatcgtggttcatcatgcggtagtcagccatttgttcatacttcgtacctgggcgcccgtagttgcagtatggatcaattgaaatgccaccacgtggtgtgaatttcccccatacctcaatataacgcggatccattaatttaattaaatcgttcataataacgttcatgcaatcttcgtggaaatcaccatgattgcggaaactaaataaatacaactttaaagatttactctctaccattttttgctctggaatatagctaatataaattgttgcaaaatctggttgtcctgttttcgggcataaacttgtaaattcaggacaattgaattttacaaaataatcacggtttggatgattattatcaaatacctctaatatttctgggctatattcaaataaatattttgtattttgattccctagtaatgttacatcttttaaatcttcatctaatcttcctgtcattttaaacatcccttctcgttatacgccgcgcttatttccccatactaacgcatgaagctgaggcaatactttggcatcattcatctctttacaatttacagctttatcaatcagccattcatacttatctaataaattttttataagcatcgcatcatccactgtttttgtatcatcgtttcctacttgtaagaaaaatggtacctttggataacgttcgtgcatcttaactgcatattcaaaatcatgatcatcgaatactactacttttaaactaatatcttttcctgctagtttctcaataatagcatctaacttatgaaaatctgttttcatcgttgaacttggtggttttggagaaattgttacctcatcaatttgaagtaaccaatcttgccatttactcccttgcgtttcaattgccgttcgcattccattttcttttaatatagaaagaagaaactcaatatttttcagcaatgccggatttccacctgaaatcgtaacatgagaaaaattttctcctccaattgcaacaagctcatcccaaatatcttctggtgtcatctgtctaatttgatctttagctgatccatcccacgtaaaagcagaatcacaccaagcacagctataatcacaaccagctgtacgaataaacattgttttttgccctacaaccattccttcaccttgaatagtcggaccgaatatttctaagacagggattttactcatcaagcatccactcccgtcttacttccgcataactagtcggcgtctcaaatagacgaacaaattcaacgcgagctcctttatattcgttcactcgattctcttttgttagtgcttctgccatcttttcataaatccaaacgaccatattttcagcagtcgtattcattgcaggtaacgtttcgtttaaataacgatgatctagataaatttcgatttcatttttccaaatttcttttatatctccaaagtcaattgcaagacctatttcatttacatatccactaattccaaatacaactttatatgtgtgaccgtgtaagtttttacatttcccttcataacagtgtaaatggtgtgctgcatcaaatgtaaattccttgctgaccattactcttttattatggtatttgagttgtttacgctgaatatccttgtccattttttgcaaattctctacgatgcgaaatccaaaaaagttatccattagttattcgctccttcgcgttcttgtaggtacgtatctaatcctgctttacgaagttgacatgctggacattcaccgcaaccatcaccaatgattccgttataacatgttaatgttttttctcgaacaaactcaaatgctccaagttcatctgataatttccatgtttcagccttatcaatccacataagtggcgtgtgaatgacaaacgggtaatccatagataaatttaaagtaacatttaacgatttcacaaacacgtcacggcagtctggataaccactgaaatcagtttcacatacacccgttacaatatgacgtgctccaacttgttttgctaatacagcagcaaatgataagaagagtaaatttcgtccatctacaaatgtcgatggcaattcaccttcttcatgtgtaatctccatatccgttctggttaacgcatttggagcaagttgatttaatagactcatatctagtaccgtatgctttattcctagttcttttgcaatttccgctgcacaatcaatttctagcttatgacgttgattgtaattaaacgttacagcttctacctctgcaaactgctctattgcccaaaataaacatgtcgtactatcttgtcctccactaaaaacaacaactgctttttcttttttcatttcactcattctccttctctactataaataagaagaaagaacgttcttgaactgtcacaataaaaaaacaaaacaatacctaaggatattgttgtttccatagttttttatagagggagttcgcgaacctctcccgcgcgatgcacggaatttcttctttcattgacacagcttattgtaacatattgtatactagcgtaaaaatttctgatttttccgctatttattatttcatttctttcattttatagtatgattaatttaatctaagaagagaggaggcatcccactgaaatcctttattatttatctctttttaaatatattattcatcctgattacaatgctcgtatatcatttattttggaatcaaaaagggaaacgctctcctaaattaaattcagctatattcattgtactctgttgccttgctaccgtactctgtattacatttgcagcaaaaacaaataatggttttcaatttgatatgcgccatattgtattaattgtcggtacattaacgggagggcctattgctggtggttctatcttagttgtattaaacatatatcgcttattattaggtggggtaggtgttttcccatctcttatcggttctgttcttctatttattgttctactattaacatataaattttttaatcaaacttctaatcgtataaaaataacacttgctattatctacagtctcacatacggatttagttggatacccttcttcctttcaaaggttacaaataagactgattatatactgcatattattgtgtatgagttatgttcaatgcttggtacgattctaattttatatttactgcacatattacaaactcaagttcgtctccaaaacgaacttataaatgctgaaaagtttcatttaattggtgaaatggcagcgtctatctctcatgaaattcgcaatccattaacttcaacgaaaggttttttacaactgttacaatcagatacctgtactgagcaggaacgaaaattgtatatcgacattgccattaacggcatcgaacaagcaaatcatgttcttacagattatttaacctttgctaaaccaagcattgaaaaagaacaaacattacagttagaagaagaattactacatgcattgtcgttaattacaccgcttactaatttaacaaatgtacgtactcattatataaagcaaagcacttctttttttatcgctggtgaaaagcaaaaactaaatcaatgtttattaaatattttaaaaaattgcattgaggctatgccaaaaggcggtgatctttatttcacattagttcctgatcataagcatattcagttatatataaaagatacaggagtcggtatggattcagaacaagtaaaacgtcttggctctcctttttattcaacgaaagaaaaaggtactggacttggaatgatggtcgtattcagtgttgttcaagctatgaatggaaaaattgatattataagtgaaaaaggaatcggtacaacctttttattaacttttccactcatacaaaaaacgtgatgaaatactcatcacgttttttctgttccttcaactaattcagcaaaagctttcacttttccgtgcggttgttgattttctttacgtgctttccaggcgcgctcttcttctcgcttcttcttagacatgttttttcaactccttcttttctttctccatgtagtattccaaaataagaaagaaaactatgcacgtatcaaaaaagaagtggtttcccacttcttccactttagcgttgcaaaattgcatgtttcgcctcttttaactgcgtaagatgtctttgttcatgcaaatcaagaaattgaacccattgatacaaattcagatcattaaaaacaggatgctttaatccattttcaaataaatctttttcatctataacactatgaagcgcgtgtaatagttcttggcgtgaatgttctagcaattgaattccttgctgttttttcattaaagtttctgttggttgcatttgctgaggagcttctcgtttatgtgtgcgatcaagcgtaagttggaggtctttaaatggagtcatgtttctttcctttttttgtaaagcatatacaagggcagacgtgacagattgttcaactaaatgcaagtggtgtaaaatttgaataatgctccatttatcacggcgtggctttacattcacttctgtgtcatttaacatttcaatttctgataatagcgtgcttcgagtagactgtaatgagtttactaaactttctaaacttacatccatattagattgaagcatacttgttccccccttttgtttgtgaaaagaggtgctccttattagaaacacctctttagtattctgaattttcttttattatctcatcattttcccattatgtcgatgttaaacatgtgaaaaaaagcgcatgttttttacaattttgtgtcgtcaatcgcatgtaaccatgcttcaatttctgtaataacacttttcacacagccttcagcaaatggtgatgttaaatttgcaacttctactaattctaagaacgatttacttccaccttgttggcacagattcacataatcttcccaagcctcttgtctattatctcttgcacgtttccaaaattgtagcgcacaaatttgagcaagcgtgtaatcaatataatagaacggtgagctataaatatgcccttgacgttgccaaaaaccaccgcgctctaaataatcattatcctcataatcacgatgtggtaaatatttcttctctatgttacgccatgctgtcttacgctcttcaggtgatgcttcaggattttcatatacataatgttgatattcatcaacagatacaccataaggtaaaaacagaagtgctgaacttaagtgagagaagtaatatttatctgcatcttcttcaaagaatagcttcatccatggccatgtaaagaattccatactcatagagtggatttcacatgcctcatatgttggccaattatattctggaatttcaaatttacgactttcatatacttggaaagcatgacctgcttcatgtgttaatacatcaatgtcaccagatgttccattgaagtttgagaaaataaatggcgctttataattctcaatatatgtacaatatccgccaccagcttttccttttttcgcaactaaatctaataaatcattatctagcatgaaattgaaaaattcatctgtttcaatcgataactctttatacattgtctttccatgatcaacaatccaatccgcatctccttttggagttgggttacctgtagcaaactcaaagttttcgtcgtaataagctaacttctctacaccgatacgtgcttgttgtcgctttcttaattccgttgtaacgggaacgatataatctagcacttgctgacggtaattagccaccatctccgcattataatctgtacggtacattcttgcatatccaagttcaacaaagtttttgaaacctaaagattttgcgattttcgttctcactttaacaagctcatcataaatacgatctagttcttcctcaattccagctaaaaatccgtagtatgcttcacttgctgctttacgttcgcttctttcttttccttgcataaacggaatcagttgcgataacgttctttcttctccagcaaagtcaatttttgcagatgctaataactgtgtatattgcgatgataatttattttctaattgtaaatctttcacgacttcatctgaatatgtttttaaatcacattctgctagagcaaataattgttttccataatacgcctctaattcttcacgaaatggagaattaatgagtgccttataatattttgtaccatatccttgtacaactggagagaattcatcaaagaaatcctgctcctccttataaaaagtatccgtcgtatcaacagaatggcgaatgtaacaaaggtttcccattgtaccaaaatcgttgcgaatctcattaattgaatgaatgacttgtttttgttcttctacagtttttgcgttatcaaacttctctaaagcaacagtaaatttctcttttaactcttcaatatttgggcgtttatattcatagtctttaaatgacatgaacgagcctcctctccattacatacctttattataattcaatacgtattctcgaatcccctcttaatttccaacaaatttcggcagtgactgccatgagttcattacaaataaaaaagccttggatttatttatccaaagctcctttggaacatattatttttcatacttcccaattttttttaataaatcaagtaattcatctttttcatctttcgttaacatttcaaaagactgatgtataactttctcatgccccggaaaaatagaagcaataaagttctcgccagactcagttaattgcgcgtaaataacacgtctgtcattcggacatgggattctctttactaatccctttttctccaacttatctacaacatatgtaatgctgccactagctattaaaatgcgctcaccaatttgctggagtggttgaccgcctttatgatatagcagttctaatacagcaaattcagttggatttaacccgttactttgtatagatttatttgtagtatccataacagaacgatgtacacgagataatgcaataaatacttttaaagattgagaaatatcttctcgttcattatttgatgtcatacaactttcaacccttcacttaaattctcagcaataaaaagaaaataccacttcatacttcatgtgaattccgaatgagcattcactcatccatttcctctcccctaatatattaaaaatcattcttgaataaaaacatgacaattttaacatagtttatatataatgataataaaaaaagaaggagtaccacatttgaaagtcaaattccaaagcataattatatatatattgcttgttatcctaccgacaatagggattggtgctacattttattcgtatcatacatataaaatgaaacaggaaaacaaattatctgctcatacagttctctttttatatagagattatttggatcatcatcttggtgaagcaatttctgctttagacatgcttgcaaaagttgtaggcaccgagactggtaatataaatggcattaaacaaattgtacatgatacagatggaaacgatgcacgcttttctggtctatattacgctacaccagaaggagtcattacaatcgcatctgaagatgaatcaaagcctatagatgtttcagaccgtaaatatattcaagacgcgctccaaactaaaaaaaccactgtatcatcagtcattactgatcgcgttcttggacataaagctattatgattgctgcccccatatttaataaacagaaggagctctcaggattattattagctagtttacgctttgattacatttcctcttctttaaatgccattaaaccacaataccattttgaggtaactgataaacatgatgtagtttttctaaccgatgataataacgacacaagtgatacgcattctaatatgcttactaccccactccaaagattaaattggaaggtctctgtttctccattacccattcatcaaaaaaccttataccagtgggttgcaatagagtgtatagctactttatttttaatgtctattttatttttgcttgctcaatatatgttgttaaaacgtcaaacaaaacttgaaagacaacaaaatgaactacagaaaattgaattagttggaacttttgcagcgagtacagcacacgaaatccgtaatcctcttactggaattaaaggactcgtcgctctattaaaagagaaatataaagatgaacaagatcagttctacttttccgtaattgaacaagaaatagagcgaatcaatgaaattgtaagtgaatttcttattctaggaaagccaaccgccatcatcgaacaaacatatgatgtaagaacaattctaaatgaggtagcattaattattcaatctgaggcgaatttacataacattgtattccatttacatttgccagaccatcctgttcatatccgttgttcgaaagaccatatgaaacaagtggttttaaacattaccaaaaatgcaattgaggccatgacttctaatgatacactaaccattgtagtaaaaaacaatgaaacacacgcacaactgcatattacagatactggaaaagggattccgcaacatattcaaaaacacctctttcatccgttctttactaataaagatactggaacaggtcttggacttgtcatatgtaaacgaattgtagagatgtataatgggcatatttttatcgacagtacagaaaatgaaggaacgacagttcatatcgaaattccgttacacatagtataattatccttatcctataagggtaattatacttatttcataaaaccagccacaagcattcgccaaaaattatttgattttccttcatacccgatttggaaaataggtatttttataattgaaaaccatttcggtgtttgtttttctttataacattgatattgtaaaataagcttgtccaattcttgactaacttgaattgtctccctactatttagcccacttgttaatcctagttgaatcatttcttcacgtttcatatgaatatcacgtgaaagcttttctaatgtgtacttcctttttacagtaaacatccatatcccccttattatacttccatgctcttaacttcacttctccattgactttttttaactacttaatcatatgcaaatttgaagaatcagaaaatttaacattttctccctgtaatttacaaatctttaccctcactttgagaattattacaaattattctatctttgtaaatacattcgcaataatagacatttttttcatcttctttttttataaattctacgtaaaccggggattcttaattttccacctacttttcttcgacattttttgtttaatttatataaaaaagcaaaacataatgatgattgataaagtgaaactttaatcagtgtttttttgttcagcccccactgataattagcattcaccaatcgggtaggcagttaatctcccacctatccagcccaatgttgaggtgggagtcttactacccacaaatagcaggataacaatagaaaggaaatatttatatgcgaaaatatacgattgcattattcatcattgttttgtttttaccgtctttcttatttcctattcaagcaaatgctcatacgaataaagttgctattgtcattgatgatttcggtaataatatgaaggggactaatcaaatgttatcacttcccattccactcactgttgctgttatgccttttcttccttccacaaaagaagacgcaatagctgcccataagaaaggccatgaagttattatacatatgccaatggaacctataaaaggtaaaaaagaatggcttgggccgaaagcaattacaactgatttaagcgatgaagaaataaacaaccgacttgaacaagccattcaagaagtaccgcatgcaattggaatgaacaatcatatggggtcaaaagtaacagcggatgaaagaattgttcgccttatacttgctgcttgtaaaaaacacggtttattttacttagatagtaaaacgaatcctaatagtgtcgtcccaaaaatcggaaaagaattaggagttcctattattgaaaaccaactattttttgatgatgtgtatacagcaggacatatttcaaaacaagcccaattactcatcaaaaaaattcaagaaaaacctattatggtagctatcgggcatgtgggccccccaggtgaaattacatcacgcgttattgaaacttctatccctaaaattcgtgagcatgcagactttattttcttatctgatctagcattatccccgcctcctgtttcaaaataaagttcattactcacatataatcagcctcaccaattgggcttttacaggtaacacccgcccacctaacttctttgctttcaccaaattttgaggcgtggattttactacccacaaatagtgggacaaaaaagtacctatctatatataacagataggtacttttctttttaacttaaatataatctacgtgactcactctgaatccttttttctctatttttccgattaattgctttaattttgtttcatctaactcatctgatatatttacaataacgcggcggatatattgatcaccgttatctagcgtaaataggccaccgatattatatgcttttaacaatgtcccaagctctttaatcgttcccttacaatcttgtgttgcaattgttaatatataaccacctgttcgcataccaaatgaatcttcaataacatcaaatatattcgaatgcgttaacataccgacaaattcattataatcatttagcacggctaaaaacggaagccgacgaattacataaaaggctctgaagaaggaatccttttcaaaaataaatgcattggaatcgtagagcatatcccctgcacttacatgctctaatccgctattgcattttttttctaataaatctactttataaataatccccgtgaatttcttctcatcttctgctaataccgggatggctcgaaatcccgtttcgttcatcatttgcagtgcctcttcaccagaatcatttattttgcaaaatgttacttgctgctttggcagaaaatgatatttaactcgcaaaatatgttcctccttacatgtcaacatgtaatctatatataataaggagacctatattttatgagtgaaattatttttaaaacgctttcatttatttattaacttgtagctatatcacatccatttttatataacagagctccttgcccccttaatcattaataactttacatgatagttcattaaatattctataccctctagccattttttcgcctcttctggcgtttttccccacacaatcatgccgtaattatgaacaagaactactcctccaccttcaatgaaattcggaacattcctttctaataaatcagcgaattttttttcatcttctacaattggaattgtcatttctgttataccttcttttccgaaaacacgctccacactgcgtttatcgaacgttacttctccttcttccccatataactctgatattaaatgactatctacagtctgcacttgtaaaatacatcctgcactactttttttataaatatccgcatgcataaatgactctgcagctggtttttcttcattttcaaatactgactcgcacatgcaatttacgacaataaaatcttcttccgaaaatagccctttatctcttccttcaacatttactaagaatgttaacggctcttttgacgtacatagcgataagctaattttggtaccataaaaccaatcacgaagtgccaattcagatttcacatcttttaattcattccatttcttcagaaaaaataacatttcgtcacccccggcataatattcatataaggttcgaatcctttctatgtaaaaggaatattttttgattattctaaaaattaattgaattatcacatgagaacgcttttttgtcaatatagtttcgtggttcttctttaaaataggctattcatatgtctatactcctatctatttcctatttcattttgtacataaaaatacgctactctttaattaaagaatagcgtattttcctcattttttattccgcattaacgggcagcccgattagtgagggctaataatcagtggggaatgaacaaaacccccactgattaaagtttcactttatttctttattgcattatataaaaactgtgcatattgttcacgtgttacgaaattatctcctaaaaaattcccttccccatcgccttttgatattttattatccactaaagctttcacatatcctttcgcccaatggtcatttggtatatctttaaaattctctgcactattttcattttcttttaactgaaatactctttgtaatactactgacatttcatatcgagttaatactccatctggacggaacataccatttccatagcctgtcataattccagcttgaaccactgcatcaatagccgtttcatacatatttcctttcgtatctgtaaatgccgtttttggtactagattattttctaattttaaatacctttgtattagaagagctacttgtccacgagtaatgttatcaccaaatccaaattcaccatttccatagcctataaataatttttctttcgctaagtaattaattgcttcttctgaccaatgtccctttggtacatctttaaattctaccacttctgttttctcatcttctttagacgtattaccgtctttactttctactacattttgaataacagaccctgtaaagaaaattcctgtatccgcgaatggatctttcacaccaaattcatatattttctcacctggtgtactccatttcactacaccattactatacgtaccgttatcgctcttcagacggattttcgtagaaacctcaccatctttttcatatataggtacttttacttctttatttacttctgtttcctctaaaaatactttttgattttggacattaatataagccgtcttacttagttctataactggtcggacatcacggatttcatttgcaacaaaacttagaaatactaattttttcaaattactaactggtgataagtctgaaatataattcgcttctaaatcaagcttttgtaagtttactaaacttgataatggcgtaatatcctttaactcattgttaggtaagtgtaattgttttaactgtgtcatcttacttagaggagtaacatcttttatttcatttttcccgatccacaattcttctaattgcttcatttgctcaatgccggataaatctttaactttattacgtgttaatactaagtctgttaaaggtaatgaatataacgctttaatatcttcaatttgattacctgctaaagttaagtatgttacatttttcaaagcgcttaatggagcaacgttcgtaattttattatttgctaaattcaagtaatctagttgttccattttcgctaatgctgttacatcttctatttggttgcctgatagaaataaactttttacatttttcatttcagttagtggtgcaacgtttgtaattttattattacttaaatcaagagattctaaattatccatcttaacaagtggcgttacatctgaaaattcattaccacgcaaagctaaatgacttaattgctttaagttcgcaaagaacgacggatcttttatcttcgcattcgcaactgttaaagattttaaatttggcatatattttaatgcactataatcaagtatctcattcgtatttaaaaacaaatcctttacttgtaataaatcttctttcgtaattggtgtatttaaatcttttctattaaatacttttttattaacaagctctcttaatttcttatctgttatcatattttgattatcaactggattatccgtttccgtattgcctgaattagagttatcatctggtttctctgtttctttgttacctaaagttggatctttaatttcaaattgaacttgatatttgtgatcatatccaatagctggaataagtatatgcatttgcatattgtgcttcttctcaaactcaccaatttcaaattgaactactttcgttccattcttcctcttatcttctgacaaaaccttcacatcatgaaatacaccaggctggtttctatcttctattctaagatattgaaaataatcactatcttgcattgttacagtgacaatttttttgccagctgcaatcgttactttaggatcttttatatattgagaaaccatagatggctcatctttttggtccttatatattttaatctcagtatcatacgtgcgattactcgctgctgctaccgattgatttgcttcaacttttaatgccgctaatgctggagtagagtacgtagcaaatggaattgctaatgttgtcgctactactagcgccttcatgtaatttttttcaaaataatatcccctatcatatataatctttacaattgataagtattatcaattttccacaaataaatgataatgaatatcattatcattgtcaatgagaatattacattaaatttatatttttaaagatataaaaataaaaaagccctttattcaaagggcttttttacctatcgtatgaagaatttcacttttttccttctcattgatgacaccgattttttgcaaaatattcgcgtacaatacaagtttattatatattcgttctgacatgttctcccttctttccttcgaccaactttttttgtattggtaaattatatgaaagaggtgagaaaatgtgtccactttttgcataactgcaaatcttttattttacgatttacagataataaaactccctcctaaaaattaggcgggagtttatgtgctttcactgtatttaacaaactgtccactgaatattatgcttcttaagttcttcttcaaagctatatggcatttttttatcacaaattacgtgttgaatacgcgaaattgctgctatacgataattccctttcacgcctaccttcgtatgatcacataaaatatatgttttctcagctaatttcatcatcgcctctgacaatttcgctttctctaattcaaagctggaaactccaaaactaggtaataacccatcaatcgaaacgaacgctttatgaaaatgaaattgctgtatgacttgctgagaaatagaccctgatacacgcgaatgctttggagatacttttccacctataaacaaaacttcaccgtgaaacatctttttattaatagaagaaattaattgtgttgcgactggaaatgaacttgttacaatcgttaagtttttacgatgaacaaggtatggaaccatttgaagcggtgtacttccatcatcaattgcaatgacatcaccgtcttctacaaatgtcgctgctttataaccaattcttttcttctcttctatatgtagcatttctctttctaacattggtgcctctactccagcgcctggaagttgaacagctccaccatacacttttttcagcttcttttcacgatctaattcttctaaatatcgacgaatcgtttctgttgatacagcaaattctctcgctaattctgaaacctttactttccctttaaattctaccttttcaagaatggttcgctttctttcttctcctactacagacatagcttcacctcatttatatctcccttataaacgtccttacttatacaaagctataattttctttataagtagaaacttcttcatgaatatgaataccgcgctttgctagctcatcaaaaatcaattgtggattttcaaaggcttcttcaggcgtaacaacacccaccctatttacatttccatttgcaattaactctgcagcaatcccaaatggaataccgacgtttctcgtatacgctcttaatttttcccatcctacaacagaaccatcagataacggatgtgtatgatataacacatgtctttgcttctcattatttttcatacctattacttctacatgaagtgcataaccataaagctctgtttcttgcccttctttcgattgcaataaatactgtgaaatacaatccataatgcctatttctttcccgtttatttcaatctgatcattacgcaatatgccgtaatcatataaagcacgtacaagttgcatattttgctgtggccaagttcctctcgtctctatcagtttgacacctttattttctaatgcctttgctagcgtaatcgtttcagaatgcggaatgatatactgcgttgccttaccataaggctctggcaattctatttctctcggacgcgcaaacggaggtacttgcttaaattcaccatcttcatacactgtacgcgatggtaaatatggatcatattcatatgtcgttgtctctgtaattgatgcagaaaaagcaatcggacgatacgaaccgtgacttacacggacagactctacagtatccaattgatttgctgcatgcattgccatcatttgcgttacacccggcgtcatgccaaatccaggtaaacatatcttttcattttcaacaaatatagcatgcgattcattttcttcaccaaatccatttaagttcacaccgtgacatcctgcttctgcaatacagcgggtcgacaatctgtttaactttatcgtcgtaccgtccattacaatgtcataaccaatcatttttgcaaccgtatcctcgtgatccgttacatctacttttacaaaatcaacacgagggtcgttgagccattctactactttacggccctctacctcgttaaaatcagctactgtaattgtctcaaaagatgaaaattgaactaaatccaaaatagcttcgcgacaaattttacctgctccacctaagcaaaatactttcacccaataacagctcctttagcaatactatcaactaagcgattaatatcttgttcatgtacatcaccgatatttccaatgcggaacgtatctactttcgaaattttcccagggtaaataacaaatccataacgctttaattcgttatataactgttgaaactcgaatccctcttttggataaatgaaagatgtaataataggagattggtattcctcatctactagtggcttaaatccgatttctcccattctatttactagtagtttttgattgttgtaatatcgattgtaacgcgctcttactcctccctctttttctagttcaagtagtgcttgataaaaagcatgtacaacatgtgtaggtgaagtaaaacgccatttcccattttgtttttccatcgtttcccattgatcatataaatcaagagataaagagcgtccttgccctttacacttcaataattcatcacgttttgcgattacaaatccgaatccaggaaccccttgaatacacttattcgcactactaattaaaaaatcaatttgtaaatcagcaatgtctatttcaatcccgccgaaactactcatcgcatcaacaattgtaacctttccatactgttttcctaatttacatacatctacaattggatttataatgcctgtcgtcgtttcgcaatgaacaactgcaatatgcgtaatctctttatcttcttgcaataacttctctacttctacaatattagtaggttcccactcttctgtttgactgaccactacatcaatctgtaacatctctgccatttgcacaatgcgcttaccgtacgcaccatttgtacaaacgagaatcttcccatttgccggaataacagaaccaattactgcttcaactgaaaacgtaccgcttccttgcattaacactgttgtatatttctcttcttccttcgtcgctaacgatacaagtttagctcttacttcttgcaccatcgtattatattcatcatcccacgtacaccaatcgtatagcataacttcttttactgattttgttgtcgttaatggtcctggtgttaataataagtagtgattttcagtcatgatcctattccccttttatgaaataataagttcttgtttctcgatatgttccattacgctttcgagttcctgcatcgtttctatcgtaaagtgcgccccattttcaacgaaacgattgcgaactacttctattttttcacgaagttctaccgaatccatattctccacttcctcttccgttaaaccgagctcgctactgccaagaattacaccaactgtccacattccagcatttctaccttctttcatatctgatactgtgtccccaacttttatcatatggttcatcggatacacaccaagttccattgcatttttatagcacatccatggatatggacggcctgctggaacatcatctggcgtaacaagaaaatcaggtttatatccttgtaacgctgcttcctttgctacaatatccatcatttctctcgtataaccagtcgttgaaccaattttaattcctctttcacgtaaagaagcaatcacttcttttactccattaatcggcgaagcatagcgcggtaaaatagcgaagagaatctcttcaaattcttcatacatctcctgaatgtctgcttctgttggtaattgtcggaaaacacgattccactcactcgcaatacgaggcatctcagtaagtgcccttacatgatctatttttaataaccccattggcttacgagcttcttctgctgtaattgctacaccccgtttatgaaaaatctccatgaatacttctagtggtgcaaaacatccgtaatcaactgttgtccctgcccaatcaaaaataactgcttcaattttcattctgtccatcacctttcttacttatcttttttgccattgtgaagttcggttacgaagtgctttcgttccccattcatatacaactcttactacaatatttgtaacaacaataagcacactcattgcagctgctggcgccacatttcctgcatcatccatatttacgattgatacggcagctagtttaaaatcagctgcatataggaatacaactgccgatacagttaccattgaatttacgaagtagtacattaccatttctaaaattgctggtaaacacattggtaccgttactctaaagaatgttttataaaacggaatacccatcgactgcgaaacaagctcaaactctcgatctaatttctttaaagcagtcgttgccgtgacaaatgttacagaataaaaatgaatgatatttactagtactaacacagcgattgttccgtataaagaatgaaacgggttcgttactgatagtcccaaaatttgaatcgttggttgactaaagaaaaagacatatcctaatccgagtactaaacctggtatggctaaaggaacgatagagaaaaagtaacctgtttttcggaagaattgtagctggtctattttctcaattgcatatgcaaatacaaatgttaaaatcgccccaataactgctgtaactgctgaaacaattacgctatttttaaatgcttcaagtccatctcctgttaaactcgaaaaattaaaatgctcaaatgtaaaactcatattatatggccatactttcacacttgcagcaataccaactgccacaaataacagaatgatcataaatgtaatcacactacagtatatgaatgagatgacatctcttttcttattagctattattctgtatggtactgcttttgaagataagaaattcgcctgctttctttgcgtaatacgatcaactgcaaatgcgaatatagctgggattaataaaatcattccaactgttgcacccatcgacatattttgctgtccaattacttgtttgtatacgtcagtagcaagcacattatattgtccaccaacaatttttggtgccccaaaatcagtgaaactaagtgtaaacacaacaaacattgcactaattaatccgtactttacactaggtaaagtaaccgtgaaaaattgttttgttttactcgcccctagcatattagaagcttcatataaacgataatcggatccttgaaaggcaattagtaatatgagaaaggcttgcggaaatgtatacataacttcagctattacaattcctactggtccatataaagggatttgtataccttcaaataacccaaacattcctttcgttactagcccttgattaccaaataaatatgtaagtgctataccgtgcatcatcgttggtgcaaacaatggtaataacgctacatactgaaatacacgctttccaaaaacattcgtacgggcaattgcatatgcgtaaacgaatgcaattgaaactgaaataattgttgttgcgcccgaaatccataccgtattttgtaaagactgaactaaagttggtgttgtaaaatatttactgaaattcgctaaaccaatgaaaactccatctttattataaaaagcttgtgtaaatagttgtaatagtggtaatacaagtatgacaaggaaggaaagaatcataccgataattacaagcctttggatccattcctctttccctatacttctcttaatcttttttttcgcactttctaccttgtagttttctaacatctccatctatacaatgaccttctttccatatgacaacatatgattttctgagaaagagatttgaatcggctttccttttctaatatcagctacttctacttctgatgctaatatatccactacaattttctcattataaaggtgtgtgttttcttctacgactcgcacttccgttcgatatacagatccacgaaattccatactttccacaactgttttaataccgtccttttgtacaattgttacatgttcaggacgaattgcatgctcttcgttatttttcgaaaagaaattaatagaaccaataaaatctgccacaaacggattggctggtctttgataaatctcctctggtgttccaatctgcataatttccgcatgattcattacaacaattttatcagccatcgttaatgcctcttcttgatcatgcgtgaccataatagttgttactcctactttctcttgcaaatcacgcatttctctacgtaacttttcacgtactttcgcatctaaagcagataacggctcatcaagtaacaaaatatctggagacagagcgagcgcacgtgcaagtgccactcgctgctgttgtccaccagacatttgagcaggatatttatcttttacattcagtaaatctacaagttttaacgcctctagcgctttctcttttacttctgcttttccatatttttttgtctttaagccgtattcaatattttcaagtgctgttaaattcggaaataatgcatacgattgaaacaccattccgaagtttctctttccaggaggtaatgctgtaatatcttttccattcacagctatactacctgttgttgcctcttctagacctgctaaaattcgaagcaatgtcgttttcccacaaccacttgggcctaataaacatacaaactcatttttgttcacagtaaaagaaatatcttttaacgctgtaaatgcatcaaactgtttttgaatgtgttgaattgataaatattcgctcattttttctctctcccactcacttactttttcggttctgctttttggccaaactctttttcccatttttctaaaattttgtcacgattttctgctgcccacttaaagtcattttttttgtataacttttctgttacatctttagggaatccatctggaagtttataatcatttttaattgtcgcaaatccatttttctcgaagtataacttcattacatcatcagtaatcgcccaatctaaaaatgcttgcgctaatttttcattttttgcattatcttttttaataagtgcgttcgcttctacttcccaacctaatccttctttcggcaatacaacttcaactggtgcacctttttgtttctctttcaaagcactataaaccattgatacgccaactggatattcacccgctcctgctaatttcgctggttttgatcctgaatgcgtataacttgccatattatcatgaagtttcttcatgtaatcccagcctttatcttcacccatgatttgtagccatgcagaaactgttaaaaatcctgttccagatgatgctggatgtggcataacaagtgttcctttatactctggtttcgttaaatcttcatatgattctggcatcggtaaatttttcttctttaactcttctttatttacagcaatccccgtcataaatgcagtatttcctacccatttttcaggttgcttatcatctttaaattgtggaagaacacgatctgctccttttggagagtatccttttaacatatcttttttatctaaagctaatagacttgatgccgcagttccccatacaacatcggcttgtgtatttttcccttcagctagtaatttcgcagtaataactcctgttgaatcacgtacaatgttcaatttcacatcaggatatttctttttaaaggaatcaagataaattggtacaagctcttcttcaattgctgtgtaaacagttaatgatccagataatttgtcatctttcactttcgctccagcactttcttccttctttgcaccacaccccattaataacgaaaataccattccagtcgctacagctttaaagattgtttttttcactgtttctctctccttttacaaatcttatgtacaactcaaatataaacaactagtgtaaaagcagtattaaaccaacattaatcttttgtttgttgtttgtttttgtgtaatacgttgctacttctatgttttttcgcatttttctgctaatagaaaacactaaatttacaaataattaaaaaaacctttataatcccacaaaaaaatgaggcgtttgtaaaaaacgcctcatttttgtttccctttttttgaattacgattcgcatactttgcgctattttctccttcatactctaatgcaaattctgcatctggtaagctttctttcggagttttattattattgattgccgcattttgtttcacttttctttttaccaatacattcacctgctctcaagaaatcactttctactctagtttgaaacaacttaaaataattattactggcaagtgttaacaagtacataagaggcgttagatggaaatactacatatgaagaaatcattataaaaaggagcgataattttgaagaaaaaagaaaagattcaatcacccattttagacgaaacgctcccgcatcaaatgaattttccatcttttaaaggaacaggaaaaacgatgcaacaaccttttgtgaatcaatataatgttgtaattggagacagtaaatataattccgagaacagtccgcttaacaattggagtgatgaagtagatcctgccattatggctggcgatgagtggatccatccgacaaatgatattgggtggatttcagaagaaaatcaagagttactaaaaaacgaagtggataataaaaatgaagcttttatgcatccacaatttggcattaacgactaaaaaaccattctacctaacgtaggtagaatggtttcatactatccaataataatccgctctttcgggtatttatagcgaggtggttgttcccttccaccactagctaaaataaatgttaaaataccaacgcgtccgataaacataagcacaataagtacaagtttcccaacagttgttaaatcaggcgtaacacctgttgatagtcccgtcgttccgaaagcagaacaaacttcaacaattaagctcataagcggtacattttccgtaatagataaaatgaatagcgcagtagcacataacaaaatccccatcgtcataacgacagatgctttcagtacatcctcttcatgtagctgacgtttgaagactctaactgttctaccgccccttgcaaaggtgtatagtgacaatatactaacagcaaatgtagttgtacgtattccgcccccaaccgaacttggagatgcccctataaacattaatatactcataaataaaagcgtcggttgtgataattcacgtatatccattgttgcaagtccaccacttcgcgtcgtcacagattggaataatgtataaaatacagtttcatgccatgactttcctactaaaaaatgatttctctccagtaaaaaaatcataattgtaccaacaacaacgagtgcaaaaaatgttgttgtcgtcaattttgtaaataatgaaaaacggaataattgttgtctccttttactaaggaattgtttcacttccattagcacagggaaaccaatcgctcctaaaataattagtaacatatgaatcatttgaacaatataatcttttttatacggaattaatgattgtcctgttaaatcaaatccgccgttcgtagtggcactaacagctgcaaagaaaccgtgaaaataagcttcttgccaagtcggaaagtaaagtaaaaatcttgtccccaataagattgctccaataagttctattgaaataattacaattaaaatagaacgcatcaattctacgagacccgataaatttccttgattatggtctgccataattaatcttcttctttgcaaaccaatctttttccccgtaatgatccaaacaaatgtcccaagcgccataattcctaagccgcctaattgtaaaataagggctaaaacaataattcctgctgtagtaaacgtatctgaaatcgtaataacagacagtcccgtaacacttaccgcactaaccgatgtaaaaagcgcatctataaatgtccatttcacaccaggcttcgtaacaaacggtaaactaagcaatatcaccgatacaactaccgctaataaataaaacaaaacgatgagttgtacaggacgtaatttttgtaaaaacttttttatatctctcattccatcacttcgctaccttttttctatcgattaaataaagaaaaatctttactttctttatttgtaaataactgctcaaataatttggcaaagaccattccatatacagttccattacctccatacggcaatgcataaaacaaattatgtatcttttcgtcttcttttaaaatggggagaccatcatgagtaccaccaaatgcggctgcccaatagtagtctgcctgtatatttttatactgcgggaacatctcttttacaatattaataaggatatcacgcttatgcaataatttcgtatcaccaattgtttgaatttgtagcgcttcatctaatccgcctacaataatgcggtttcgatacgttcgaaaatataagtaaggccgtgccgtttcccaaattaacgatcgctcatgccagccttcaaattgatctatttcatttgttacaattgcataagaggtgtctactgttgtatttttttctttctttccaaaaagcgcctcataacctgtcgccataataatattctttgctacaatttgatttcctgttttcgtgtaacaaattaaatcatttttgcgtttttttatatgtattgcctctgtatgttcatatatattagctcccatttggtttgctttatgcaaaaaactatacgctagtaaatacggattcacctcagcatcaccttgcgtatataacgctgcttgttttgcaaaagaataacgtttcttaatatcagcttctgtaaaatattcaactggaaatccataattctgtaacgtattatattcctcttgtaaaaatgagacatcctcacttttacttgcataatataaactatttcgcggaataaaatggggattaatatcaagagtcggtataacctcttccattgttcttagcgcttcataacaaagcttatatgctcgtacccctttttctttaccaaatgtatggataagagaggttaacgatttatcatgaagaaattgtagtaaacctgtattagcagctgtgctaccacacgcaattgctcttttttcaataagtgtaacactcatgccaattttcgctaacgaatgcgctatatgagcaccggcttcgccgcttccaactacgagcacatcacatatcatatcattttctaacagtggataacaaggtacagaaactcctgtattccaaaacaacttacccatcataagtttcataattatactcctaaaatataaatttctcctttctatgttttgttatttttcataaaaaaatccaactaacataggctagttggatttttttatttttaattagaacgctcttcaagccaatttccaatcgtcggatatgtttgttttacagctgttccaccgtaaacgatagacatatgccctgttggtaaacatacatattgtttatctgtgctagaaatatggtctagtaatgcttctacttgacatggcaaagcgatatgatcacgtttcccggaaatatttaagacattcgccttaatatttgcaaggtctaccttttgtccgcgaataacgagttcacccttaaccaacttattattttgataaaaatcacgaatccactgtctgtatgattcacctgggaacggaataccatcaccaacccacttttgaaccaatctccagctttcgacgaagcgctcattctctgaacgatctactaaagcaacatatggaccaacaaagttcgtaattggctttaacattttgtttccgaaatcaatcatttctggcggaatatttccaaatgtatcaaccgctttatctaaattgaagtatttctcatctaataaagggccatacaatcctgtttcagagaaatcaaaaggacttgtcatgaaaattaaattacgaattggcatgtgcggatgaagtgctgcataaatagaagttagcgttccacccatgcaataaccaagtaaagaaatctcgtccgattttgcagttcgcattactttttttactgcttttgcaatataatcaaacacgaaatcatcaaatttcaaatgactatcttctaaaccaaatgtgccccaatcaagcatatacacatcaaaaccacgatccactagatattccactaaactatttccaggagttaaatccataatatatggtttattaataagagcatatattaatagaattggaactctttgtgttttttcttgttttggaatgtagcgataaagcttcgtcttattcttcgtccaaataacctctttcggcgttaatccgacttggggctctggttcacgtaataaaatttcactcgcccttttcactcggcggtatgcttttcggtactcttctgggtatagctctaattgcttttcccattctgttgcgaatgtagtcatttttctatctcctttttggtcgatttccttctaaaaaaagaagtgcattcctgctatggatatgcacttttttcttacttcattacatatataatccgccgttaatgtttaattgttgacctgtgatatacgcaccgtcacggcataggtatactacaccttttgcaatttcatcagcttgaccaaaacgttttttcgggatttttgcaacgattttttgacgtacttcttctggtacttctgctaccatttcagtatcaataaatcctgggcaaatagcgtttacagtgacatttgtttttgcaagttctaacgctaatgattttgtaaatcctaacatacccgcttttgctgctgagtagtttgtttggccaaatccacctgcttgaccaataatagaagaaatgctaataattcttccttcttctgcttccgttatgtatggaagaaccgcgcttgtcgtattaaatacgctacttaaattcacgtcaattacgcgctcccaatcttcacgatttaactttttgaatgtacgatctcttgtaataccagcattattaacaagaatatcaactttaccaaaatgattcacagcttcttctacaagtcggtttgcatcttctactttagaaacatccgcttgcactgcataaacgtcatgtccgtcttttcctaattcatttactaaattttcagctgcttctttactgctattatagttaataactactttcgctccctcttgtgctaatgctactgtaattgcttttccaattccttttgctccacctgttacgattgctacttttccatttaattgaaccatttcttttcccccttaaatgaatttgtgaacgattgttatgaatcattttggtactcatactatagagtccatatataattatgtttcgctgtttatacacgaaaagagattctccctctctcttttacatgttataaacaagcgcttttatcattttttattttctggtttattcgcaggctttacctcttcttttacaggtacttgtagtttagctagttctgcattttgcttttctagcaattctaaaatttgatctacttttgtttcaagcgtacgaatatcttgttttactttcgtcacatcacgctttaatgtaggagcttgtcctaaagaatctactttctcctctagaaactcctcaatgttatctactttattttctaagttaataacaagcgtagccactcttgcgatatcctctttcgtcggcacatttacttgttctaaatagctttttgtcgtatcatttaatgctttttgataaaacaaattcaaatctagaacgctgcccatccaagcagaatattcttctgttttaattgtttcattgagcgcttttccccaaaatgtttcggtttgttcataagcatttttccatgcttgtagtggatcgaatttttgatcaatcactttacctacactccttttttcgtttttgaaacaattcaacctattcactattttctaatattctgaataaaacttcaagtctatattttatttttttctattttctaacaaatgtgttgactttaaaaacagataggtgtaaattgcacttataagcaaaaaattccatctaactgattcatgaggtgatgcacaatcatgctacaaaatgaaccagaacaacgcgaaagtttggagagcaaccaagcgaaacaaccaaactccatgccaaaaaacttcttagttcccttcttacttctctgtctaaaagactggagtcttcatggttacaaacttattcaaatgctaatggatatcggcttttcttctgttgaccaaggtaatgtttatagaacactacgcaagttagaaaaagaaaaccttatttcttctacttgggatacaagcgatggagggccagcaaaaagaatttattctttaactgaatatggagagcaatatttaacaacatgtgcgacttcttttgaacattatcaaaatatgttgcgaacgtttttcacgttatacaccaatgcattctttccattttctacttctccagaaaaggatgaaaaggattcttcatcttcacctggtggtacagcagagtaatctgcgttcacaatatgcaaaaaaacatttgggggtcaaacaatggaaactaaaccatacgaattagtcgatgcattttggaaaaactggtctcaatcactttcccttttctcttcagctgggaaacagttagagcaacttactttagaaacattaaaacaacaacaagacgctttgcataagttaacatcaggagtagatgaactagaaaaagaactacaacaactcactgctcagttcaataaccaatatacagattacgtgaaacaattaactggaaactccttaaatgatcaaattaacgagtggcaagacaaatggaaagaactttctgctcatatgcatcagcttaccgtttctcctacaaaaacttctttgtcaattcttacacaaacaagcggtcaatttgaagaaacaacaaaacaatttattgaacaacaacaattacaacgtgaagaggctcaaaaacagttagagggttttttggaagagttcaagtcaaaacagttggaactcgcaaaaaagttcgaggaaaactcaaaaaatctatttacttccatcaagtaagaaaaatgtgggagctaaccgcagcacaaacaaaactctttcttcctcctactacatcaagatggctaacatttttcgatatggaaaagaaggaggacaaaatgaatccatttcaagaagcacaaactgttccggagcttcgctatgatgagattcaagtcggtgatcaagcatcccttacaaaaacaattacagatgaagatgttatcaattttgcaaaattgactggagatgtgaatcctattcacattttagattcttttgcgaaaacgacaatgtttaaagaacgtattgcccatggtatgctcgtttcgagttttatttctaccatccttggaacgaaactcccaggcaaaaatacgatttatttatcccaaaatgtttcattccgtgcccctgtcaaaatcggtgatacacttcgcgttgtggcagaggttattaagaagcgtgacgataaaaaaatcattacgttgcaaacaaatatatataatcaatcggatgatattgtcgtggaaggtacagcgacaatactaaaaaaagagtagcaaatttgctactcttttttctatccaataacttctaatcacaccgattacttccgcgtatgagcacgccggttccacataaaataacagtaccaattcagataagtacttatctggactggattactcataaggatgtgtatcatcatggcaaaaacaaacaaattactagttccaggtgctgaacaagcacttgatcaatttaaatatgaaattgcacaagaattcggcgtaagcttagggtctaatacagcatctcgttctaacggatcagttggcggtgaagtaacaaaacgtcttgtttctttagctcaacaacaattacgtggataataatataacatatggcttagaggcagatattctctgcctctttctatttttcacatacataatcggactttttcacatactagtaagagcaaacagaaaggaacgatatataacatgaaacggattaacattcgtatgagtcctccccgcgttcttactttgtcttttatcatgttatcaattataggtacatgcttattaaagcttccaattgctacaacaacgtctatttcatggctcgatgctttatttacaacagtttctgcttgtacggttacaggacttggtgttgtggacactggaaaagtatttactttgtttggacaatgtatcattttaacgcttatacaagttggcgggcttggtattatgagctttgctgtcttaattgcgattatgctcggaagaaaaatcggtcttcaaaatcggattttactgcaacaagcattaaatcaaacgaatataggcggcgtcatccgtcttgccaaagcattatttttattctcttttacagtcgaatgtatcgctactttaattctttcttttgattgggtaccaaaatacggggttaccaaagggatctattatagttttttccattcaatctcagcctttaacaatgctggtttttctgtgtggagcgataatttaatgtcccattctcatagcattattgtcaatttcgtcatttcctctctcatcattttaggtggaattggttttacagtgatcgtagacataaaaagaaagaaaaactttaaaaaccttacactacattcaaaacttatgctctcttctactctaatcatcaacattattgctaccctttttatttttatattcgagttccataactccctttctatgagagggtttaccccatttgaagaaggaatggcctcttatttccaagcaatttcaacgcgaactgccggttttaatacagttgatatttctacattgtcaaaaccttccctgctattaatgatgctacttatgtttattggtgctggtagtgcttcaacgggtggggggattaagttaacaacatttttaatcatattttttggcgtatttaaatttttacaacaacaagaagatattgtcgtatttaaaaaatccattaaagatactctcattgtcaaatcattaaccattactattatttctatttcatttatcttttttgctattttaattttgagtattactgaacgagtttctctattgatgagtgctttcgaagtattttcagcatttgggactgttggcctcagtatgaacttaacaccccacttaactataattggaaaagcgattattatttttatgatgttttttgggaaaatgggtcctttaacattggcattttcatttgctcgtaaaaagaaccgaaaaataaaatatccgaatgaagatattttaacaggttgacaaccgtataaattatccatataatgagaatacaataacatatctccaaaggggagtagcgtccaagaatatatcttggaaacaaagtcgtcattacgtagaacttagttcttccggctttgttggcatttttattacatatgtctagcaagacctttgcctattaacggcagaggtcttttttgcattcatttccagattctcccaaagttaataggcaggagtatggggaaactaaatagtggggaaattcttcacttatttagaagttatagagatgagaggagaatgtacatggatgtatcattattattggagtatggttgggtattactcatcctaattgcacttgaagggattttggcggctgataacgctcttgttcttgcaattatggtaaaacatttaccagaagaaaaacgaaagaaagcactattttacggattagcgggggcattcgttttccgatttggatcgttatttatgatttcgttcttagtcgatgtatggcaagtgcaagcaatcggtgccatctaccttatgtttatcgctggtaatcacttatttaaaacatatgttaaaaagaatacagatgaagaaactgaagaaaaagaagcaaagaaaaaacaagagaacttttggtggactgtatttaaagttgaggttgctgatatcgccttcgcagttgattcaattttagctgctgttgcactagcaatgactttaccaaaaacaggactaggtacaattggtagtcttgatactgggcaattcgttgttatctttgtaggtggacttatcggattaatcattatgcgatttgcagcaactgctttcgtacaaatcttaaaacgtaaaccagggcttgaaactgcagcattcttaattgtaggttgggttggtgtgaagctagcagtttatacattagcacatcctgcattaaatgtaattccacattcattcccagaatccactccgtggaagcttacattctggattgtattagtcggaatcgcagttggtggttggttcttctcaaaagaagtagaagtaaaagtggaaaagaatttagacgaaaaagcgctgtaattacagcgctttttctttttcctttcttcctcgcaatgtccagaaaaaattccattatactaccttttgtaaacgttttcttaatgtatgtatgtcctttttgtgaaacattgcacaaacttattgaaagtaagaacaattccatgtactttattcatataaggagtatttatagaagatttactaaaggagcgtattactcatgctagaacaaggactagattatgttgtcaaactggctaaaagcaaaaagaaaatactagatacaaacccaatgcaatatttcattcgtgctgcacttgctggtatttatatcggttttattattgtactatgttttaaattaggtaacttttttcacattgcagattcaccagcaacttatttagccgcttctatgtttttcgggattgctctcgtacttattatatatggcggtgctgaattgtttactgggaacacaatgtactttactgtcgcaactttaagaaaagaaacaacgatttctgatacacttcgtaactgggttgcttgttatgcaggtaacttagccggcgcattattctttgccttactattttacgcaactggaatttttgaagcaattgatcacggtcacttaatgagtaaagtcgttgaaggaaagatgaatacacctacgatgcagttattctttaaagccattttatgtaactggctcgtatgtcttgcttgcttcttaccttctcaggttaaaggtgacacagcaaaaataatggtcatgatgctacttgttttcacattcttcttatctggttacgaacatagtattgcaaacttatcactctttgctttatctttagtttcaccgcatcctgagacaatttctttttcaggtgctattcataacttaattcctgttacaattggtaacattattggcggatcagtatttgtcggtatggtataccactacttaacaaagaaaacccctgaagttcaacaggaagaaactgaaatcgcaacagctcaacaagaagagattattcctttacaagcccatatgaaacattaaaaactccaaagttttactttggagtttttagcttcccacgtatttaataacaaggtgaggagtaatttctccttcttcctttcccttatccattctctgtttcatcttgtacataccgatgacatcattcgtatgaaagtgaatttcatttacatataacccctctgtacaaaaagcttctacaaaatccagtccatttttcgctccccatcccatattaaaatcaagagaaagaatattcacatcataatcctgaaccatttgcaaagcacattctactgtagttgcgggcacatacccgaacgggcaacttctttgatcatccatatatacgttcattttcgattccctctctaatttgaatatgcggccaatacataacatattgccccgagactaataaaaggaccaaatggaattggctttcgtacttctatacgttttaatccgataccaatcccgaaaaaacaaagactaaaacaagatgctaaaaataaaacgataaaaactcctttcactcctactataaatccaagtaacgaaagtagttttatatctcctccgccaagcccttctggatatatcttttgcatgcaatataacaaaataaatataacaccactaccagctatactatctgtccaagtaactaattgtacaaaaacactttcgagaatgagtaaaaaggcaaacgaaattaaaatacaatcaggaattaacatatataagtaatctgtaactgaaataataagaagcagcgaaaaaagggataaaataataataagctctcgttctattccaatcatatacactgtaagaagaaatatacctcctgttatacattcaaatgctacatacataattggaattttcctcttacaattcgtacaacagcctctttgtatataaaatgaaatgatggggattagttcttttgtccttagcacatatttgcaataatcacaatgtgaacgcggggtaataatagaagcacctaatggaaccctcatcgcaactagcataaaaaaagaaccaaacaccatccctgctaacagtgcatataaataagtgaacatcccttcctctcctttcccaaaaaacatagcaaaaaaaggagagaacttctacttcatattatcctttattctactaaaaagcaggccatttcctggcctgctttcccctcttttatacgatgaaataaactgcttttaatggtccatgtactccgacaacaagattcatctcgatgtcagccgagttacttggccctgtaataaagttaatacaagatgccgctgtctccccattttctacgcgtgagttcatatcctgaactgcttgtgtaatacgaggcacaagtgtttcacgtggaataatagcaaaatatacagtcggtaaaaagtgtaaagaacgcccttgacctttatgactttgtacaacaattgtaccagattcagctaatgtataatcactaaatgcaataccaatattcgctttttcagctaaacgcatattttcgtcttttctctctggatcccatacatttacttcaacatctcgttttggaagttcttctttaaataaagatgttaaaccatatgcatcaaaacgcgcatctgctgataataaaataggtcccccgccgttttccatgattactttttgaaggtcttcacctaaacggtcgtttgtcgtttctactacagttgtatgaatgtttgtacattgctctttaaacacttctagtaattcttcttgtgaataatcttttaacgtttctatattcacattacttttccatactggacgctctacaccttctgttttacgcgcgcgcccaagttcttttgcaatgttatctagaaaggcatcacggttttgaattaatcctgtcattatttatccccgcctttcttatgatctttataccaatcacggaatcgttctttacttggagctgggaattcacgaatatccgtccagtttttaagtggtccaacaccttttgatacacgattaccagatgtaaatggactcattgccgctggtgccatttttgaacccattttatataaagcagctgaagaagcacccatactaaacattttcatagccagtttttctgcaagtggtgcacgaccttcttgctcaacgatgacttgacgatgttttaataataaatcatgcaatggaatttttactggacaagcttctgtacatgctccgcataaactagatgcataaggaagctctttgtaatcatcatatccacctagaagcggtgttaataccgcaccgattggtcctgagtaaatcgatccatatgaatgtccaccaacgtgacgatatacaggacatacattaacacaagcagcgcaacgaatacattgtaatactgaacggaattcagatccaagaatttgagagcgaccattatcaacaacaactaaatgaaattcttcaggtccatcaacttcctcttcttgaattggccccgctactgttacataacttgttaatttttgacctactgcactacgacatagtaaaccaactaaaacatctaattcttccattgtcggaaccatacgttccatacccattaccgctatttgtgttttaggaattgacataacaagatctgcattaccttcattcgttactaaacaaagagagccagtatttgcaacagcaaagttacaaccagttacaccaatttctgcatccataaatttctcacgaagttgtttacgaacaaactttgtcatttcatacgggtcatcagaattttcataacctagcttttctttaaatacatcgcgaatttgcgttctatttttatgaagtgcaggtgcaataatatgtgaaggtggatcgttatctacttgcaagatatactctcctaagtcactctctaacacttcacagccaatctcttcaagcgcatggttcatactgatttcttctgttaccatcgactttgattttactatcttttttgcctgcttcttttttgcaacgtcttgaatatactttgctgcttcctctttcgttttcgcaaagtacacgtgtccgcctctttttgatacattttcacttaactgcattaagtaataatcaagattttctaacgtatgttgacgaatttgttcacctagttcacgccactcttcccagtttcctagttcatctgcggcttttaagcgattcgtatataaacgcgtttgtgcagaagatactgctccgcgcataaacgaatcttgaattccatcaccaacgcgatcattaaattttttctcactgattttcatagacatagcttatgttcccccttcatgagcgactattcagtacctcagcaatatgcattacttttacttcttttcctaaacgctcaatacgtccgccaatgtttaacaaacacccacaatctgcaccgattaaataatctgcacctgtttccattacactatctactttttcgtctaccatttgctcagaaattggagtcatcttaactgaaaacgttcccccaaacccgcaacaattttgcacgtttggcaaatctctcacagttaatccttttacatttgataataaaattcctggtgcttcttttattccaagcatacgtgtcatatgacatgatttatgaatagtagcgacccctggtaaacttgcaccaacatcagtaacctttaaaacatccacaataaactgtgtaaattcataagttttatcagcaactttttgtgcacgtttagcccactttggatcatctttgaaaacatgtggatactcatgaaacattgtcgcacaagaaccagatggcgtaacaatatattctgcatcttcgaaagtttcaatcatatgtttcattgcttcttttgctgcttctacatggccgctattataagcaggctgaccacaacaaacttgcgcttctggaaattcaatttcacaacctaaacgctccaacacttcaaccgttgctttaccgacatttgtttcaaacatatcgactaaacaagtaacaaataaagtaactttcataactattactccccctttttacaacttcaccaacaaacatatggtcatcagatgacttagcagagaagaaataggctcaaccatggcctatcctctccctcttctaaagaaaacgcttacttaacctttctctattttatcagaaaattaaatttttaaaagattaaattacgaatttatatcgtttttacctgtgacaatatgttctacatttgttaagtgatctagcattgcttgctgcgctaattctacatcttgttttaacaccgcatcatatataacttgatgctcttctataagtcgttctgatgtcgtttgttcaccatataaaataatgcgtcttgattcaccaatcgtttcagcaatcatctctgaaacatgattcatgagttcaagcaaaatgctattatgcgaagactctgcaattcccatatgaaattgaaaatcggctttttcgccagccttttcatctccaatgctctttgccatttcatctaaccaatgtttcatattttgtaaattatcttccgtacgttttgccgccgctactcgaactgcccccacttcaagcacctttcgtacttctaataaattcaaaatatcttctttcttcattaataatctattgtttaatgatttcgttaatgaagaagaatcgaagttcttcacatatgtaccttctccttgtttcatctcaattaagcccatcgctcttagcgcacttagcgcttcacgaacagcagatctgccaacttgaaactgctcagctaattgatgcacagggagtagtttgtcaccaggttttaacgtaccatttttaatcattgttaaaatagcttcagatacttcttcgtaaatttttttcggtttaatagatttgtactccagttaaatcacctcagtatcttccaaacaacaattgaaacgatttataagaactttgcatcataactattttagaccgaattgataagaagtacaaatgttttgttcataaaatagtcaaattttcgatatttattacatattaatttatatttttacgtataaagtgaaactttaatcagtgagggttttgttcatcccccactgattattagccctcaccaatcgggcttttacgggcagcagtgcctccacctaacttctttgcttccgctgaattttgaggtgagggtcttactgaccggagaatagcgggataaatattttcttcaatataaagaacatgccctaaaaattagaacatgccccctcatcctgtacattcagtttaataataaccgttgttcccttatctttttcactttcaattttccactgtccaccatgtatatgaacaatttgtttcacaatagcaaggcctaaacctgttccaccatgttgacgacttctcgctttatcaactcggtaaaagcgttccccaagattctccaaatgctctatatcaatgccaattcctgtatcttttatttttaattcacagtaatcatcgatttgctctaaagttataacgatatttcctttttgatttgtataccgtatcgcattatctaacacattatgaagcacttgttgcatacgatcctcatcaatcatgacaatgacctctggatttaaattggttgaaatatgaatttccttttctataaacttaatctcatacgtatctaatacgtcttcaatcagctgtgaaaaaacgataggttgcttctttaacggaaagtgctcaccttctaattgtgctaagtctaacaagtcatgaacgagacgctgcatacgacctgcttctttatgaattagctgagttactttttcctgctgagctccctttgcaacaccatctaaaatagcctcgctatacccttttatataactaagtggtgttctaagttcatgcgaaacatttgctaaaaattccttacgctttacatcttctgtttctaatgaatttgccattttattaaatgcttttcctaatcgtccaatttcatcctctgaagaaactgtaatccgctccgaaaaatctcccgtagccaaatgatttgcaacccgctccatttgcgaaagtggcttcgtaattgcaattataatttttcttccaacccatatcgtaattaaaatcatagcaattgctagcggtgctaaaataagacccatatcatagattaaatcttttatactttttaaaggaatatacgaatagacaattccgactaattttttattttccaatacaggaatgacaacccccataatattacgttcaaaatgttcttcatatcctatttttgtcacagttttcccatctaatagcgtttgcctatctccttcacttataagagaatgatgatgcacatcaaaaggcaaacatgcgcttaaatcacgcggattagatacgaaaataacgtctgaactagatatttgatcaaacgatcttactttctcttcaaaagttgatattccttcacgcttatcatattgagcagcaagacttttcccttccattactaacgaagtttttaaattatcaacgtataacttttcatacgagtataaagatacgaaataaagaaaggacactgttacacatactgcacatactactgtaagccaaagtttttgtaccatcgtaaacatatgttacacctcaaatttatagcctacaccccaaacagtttgaatgtagtttccactttctccaagcttcaagcgcatcgttttcacgtgcgtatctactgttcttgtacttccggcataatcatatccccataccttttcaagtaattgctcccggctaaatacttgtcctgtatgctgacaaagaaaatatagtaaatcaaactcttttacagtaagagaaatcgactcaccattcgcctcaattcgtctgcttttttcattgataagaattggtccaaattgaatctcttcttgctgttcttgctttgtatatcttcttagtacagcttccatacgggcaaccaattcaccaggactaaacggttttacaatataatcatctgctcccatacgtaagccattcaccctattccactcttcaccttttgcggttaaaaatataatcggcacatctgacgtttttctaatttctttacaaactgaaagtccatccatttctggcatcattatatctaatacaacgaaatcataatgatccgtttctagttttttaagagcctcttttccgttttcagcttctccccactcatatccaaagttatccaaatacattccaacaagctgcctcatatcactttcatcatctacaactagcactctatatttattcattgtccttcccttccctctctatgagttgaaacggtccttttccgactttaattgtttgttttattttcatactcttcatatccatgacgcacacttcatcactatcataacttgctacatatccttctgctccgcttttcaaaaatgcaaatggatttgagcctatttcaacggaagctacctctttatacgtactaatatcaaattttctaagcatattcgaaccgtggcttaatgcatatacgtacttattatctttcgttatgttcacaggcataaatggagcgtgtaaagaacgtaccatttcaccgctctgtaaagaatacactaatactttctcattcacttgatttccatcaccatgcccgccaatccatatttctttcccatcaggactaatcgtcgctcctgttgatgctggcggaatcataaaggattgaacaacttcttttttcttcgtatcaattgtcgttagtttcgtatcataaaagtttagtacagataaccgattctgatactctaccatcgttataggcccttttcctgttgaaacatttcctgtctctttcccatttatcgtaaagaaccttaccttttgaacattttgatcagcagcaaataattgttttttatctgctgatacgaccacatttacaatgccctttccagttttatatttttccacttgccttccttccgctagtgaatatacatacatatattctaattgcttaccgtatacaagtatttcatcgccatttggaagcagtgtgattccagccattggctcatttagttcccatgtcgtaattaactttttatcttttttatcaataaaactaatactgccttcttttatattcgtagttataataacatttttatctttagcaattggtgtatatgaacttccttgacaccctactaatagaaataaaaaacagagaagaaaaacatactttctcaaaagattccctccaccttcagatgatttcgttataattgtaaaataacaaataaatgtgtggaaagtgtgaaattcccctttcttactcaatttacatatataatgtacaacaaatagaatttgaggtgtgtcaattatgctatttcctgatttagcgaataaaattgtacgagaagtacgcagactaattacagaaaatataattatcattaatatagaaggcgttattatcgcaagtacagatacagaaagaattggccaatttcatgaaggtgcactccgctgcgctaaacaaaagaaaaccgtcatcattacaaaagaagatgaaaggcgattgcaaggtgtaaaggctgggatgaatcttcctctattatttcatgatgaagtaatcggtgtcattgggattaccggagaacctgaaaacatttcacgctacggagaaatattgcgtaagatgaccgaattattaattcatgaaaactactttttagagcaattagaacttgagcaccgttcttatgaagcttttgtctttgattggcttcaaaatacagagtggtccccgagttttcttgatcgtgccaaaacacttggcattgatttatataagaaaaaacaacttgttttgttttctattggcaaaaatgacacaatgctccagcgtaaaatatggcaacatgtacgaaatattttaacaaaagagcatctatttgttcgctggggaaatgatcgttttattttatttacagcgatgagctccaaagaacaaacttatcagtttttaaaacggttaaaacaagactgcgaagctttattttctattcctttatatatcgggattgggcaaacagttaccccaaacaatatgaacatatgttacgaacaagcattacgtgctctttctgtatcattggaaacgaaaaaaattgtatttaatgaagatttacgtttagaaatgtgtttacaagatatttctgccgaaacgcgtgaacaatttctagagcgtaccatcgaaagcttactatcatctcctgagcttatgcacactttacgcttatttatcgattataaccaatcttataaacagacagctaaacaattacatatacacattaacaccttacattataggctaaaaaagattgaagaacatacaggacttgatccaaaacaattcaaagacttaaacgttttatacttcgcactcctcctattagataatcatacaaaaaagaacgataaaacagattaatctttagatgattatacatagaaagaatccctcgacttttttatcattataatgaaagcactgttaccacgttgtttattataactaaacacgttaacagtttgagggggatttccaatgttagaaaaacaaattattcattcattcgtatctattgttggcgaagataatgtagatacatccaatatggggcgtttaacttatagttatgatgccactccaaacttccaagcaatgcctgatgcagtcattgctcctcgtaatacaaatgaagtagctgaagtgttaaaagtatgtaacacttacaaaatccctgtgtatgtgcgcgggtctggaacaaatctttgcgcaggaacatgtccacttgaaggcggtatcgtccttattttccgccatatgaacaatattttagaaattgatgaagaaaacttaacaattactgtacaagctggtgtcattacacttgatattattaaagcggtagaagaaaaaggtttattttatccaccagatccaagctcgatgaaaatttctacaatcggcggtaatattaatgaaaactcaggtggattacgcggtttgaaatatggcgtaacacgtgattatgtaatggggcttgaacttgtcttaccaaatggtgatattattcgcactggtggtaaattagcaaaagatgtagctggttacgatttaactcgtttatttatcggttctgaaggaacactcggcgtcgtaacagaagccatattaaaacttgttcctatgcctgaaacaaagaaaacaatgcttgcattatatgaagatattaatgaagctgcacgtgctgtttcttctattattgcaaataaaatcattccagcaacactggagtttttagaccaaccgacaattgaagtagtagaagagtttgcacaaatcggtttacctacagatgtaaaagcaattttattaatcgaacaagacggtccgcccgaagtagtcaatcgagatattgaaaaaatggctaacgtttgtcactctatgaatgcggttgatgttcgtgttgcaaaagatgaaacagaagcagatgcgcttcgtaccgctcgtcgtagtgccctatcagcgcttgcaagattaaaacctactacaatattagaagatgcaactgtaccacgttcacaaatagctccaatggttgaagctattaataccattgcaaaaaaatataatattcctatttgtacgtttgggcacgctggtgatggtaacttacatccaacttgtatgacagacgttcgtaatgcagaagaaatgcaccgagctgaacaagcttttgctgaaatatttgcgaaagcaattgaacttggtggcacaattactggtgaacatggtgttggtgcgatgaaagctccatatttagaaatgaaattaggtaaggaaggtattgcagctatgcaaggaataaagcaagctttcgatccaaataacattatgaatcctggaaaaatgttcgcgaaagacactcgaaaaagagtggtggttgagcgatgacgacattgaataaagaaaatattcaaaaagaatttaaagaacgattaagtgaagatgaattactaaactgtatgcgatgcggtttttgtttacctacttgtcctacctacattcaatccggatataaagagtcacattcaccgcgcggacgtatcgcattaatgaaagctgtcgttgatggtttaatcgaaccagatgaagatgttgaagatacattaaacgtttgtcttggttgccgtgcttgtgaacctgtttgtccatctggtgtaaattatggccatttattagaagaagctcgtgatattattaatcaaaataaaaaattctcggtgccagtgaaagctgttcgaaaagtcgtttttgaaggattattcccccatcaaaatcgaatgagaacattaactggactaatcggattttatcaacgttctggtttacaaacgctaacacataaaacagggattatgaagttattccctgaaacacttgcaacgatggatctcgttttaccaaaagtccctaaaatgaaagcgatgaaagatcgtccttcatttttacctgcagaaagtacaaagaaaaaacaagttgcattcttcacaggctgcttaatggatacgatgtttttagaaacaaataacgcaacgatgaaacttcttcaactagctggttgtgatatcgttattccaaaaacacaaagttgctgcggtgcattacatggacatgctggtgaaaagagtggagcaaaagaattagcaaagcgaaatataaaagcattcgaagatttaaacatcgactatattattaccaatgcaggtggttgcggggcttatcttgtagactatgattatcttttaaaggatgatccggattgggctgaacgtgctaagcagtttgtttctaagattaaagatattactgctatactagtagaactagacttccataagcgaactgacttacgactcacgccgcaagttattacgtatcaagactcttgtcatttacgcaatgttatgcgcacatcttctgaacctcgtatgttactagaggctatccaaggtgcaacatatcgagaaatgaaagatgccgatcgttgctgtggctctgctggtatttacaatattgttcattcagagttatcaatggaatttctagattacaaaatggaccgtgtgcatgaaacagaagcagcaaccattgttactgcaaatccaggttgtttattacaaatgaaattgggcattgagcgagaagggctttctcataaaatgagaggaattcacattgtggatttattattagaagcaattgaaactaactcgtaataactcgtaacatacgtaataataggaaaacggctatctccttcgtctatgtaaagagatagccgcttttttgtctgctacaacattaaaaatatgttactttattataaaaaagaacaacagaaacattacagttttgtaaaaatcaatccattatattcctcaaaaaatcgttcaaaccattgatacaataggattcttcattttctatttaggtaactttatccaaaaaccccctcttaaaaccaagtataaaaacactataaattccttttatactctatatttctcttatttttgctcccttcttctcttaggataaattaggtaattttaaagtctatgaatttttttccatcttttttctcgcaaattgtatgctacgatgaatttgtcagtcagacaggctgtcaaaaacaaatcgtgtgaaaacaaattaaaactttatatagggggacacacatcatgaaaaagcgtgttttattatctgtagctgctgcaacagctcttactttaggagtatcttctctagatgcacaagctgcaacagtacaaccatctaacgtaaaggttcaaaatattcagcattcaaaagtgatgatgaaacaaatgaaccaacaagaattacaagcattcttacaatctatgggagttgaatcattagcacaatggcaacaaggaaacttccaaccaaactgcttcattcctggtcaacaacctactgaaaatgttgtaactgagcaaccaacagctaagccagaaactcaaaagccagttgaacaaaaaccagccgagcaaaagcctgctgaagaagttcaaaaaccagaagctcaaaaacctgctgaaaacaacaatactcaaaaacctgctgaacaaaaaccagctgagcaaaagcctgctgaagaagcaaaatctttaagtgagttcgaacaacgtgttgttgaattaacaaacgctgagcgtgcaaaacaaggcttaccagcactaaaaatcgatactgaattaagcaaagtagcacgtattaagtctgaagatatgcaaaaaaacaactactttgatcataacagccctacatacggatctccgtttgatatgatgaagaaatttggtatttcttatacatctgcaggtgaaaacatcgctcaaggccaacgtacacctgaagaagtagtacaagcttggatgaacagcgctggacaccgtgcaaacattttaaataacggcttcactcacatcggtgttggttatgtagaaagcggcaactactggacacaacaatttattacgaagtaaatagattaaaagagtcttctcataatgagaagactcttttttaagtttcatagctttctattatgtatgaatagaaaatatataacataaacaacatagatccacagcttattatactaagcaatacataaaatccccactctaagttcaaaaacaatgaaaacaatatgccccatgccatcacttgaaaaattcgtctactcactaaacgaattttttgtaatttaattgggtctttttctttttctttttctttgccttttatgttcttaaattctttactcagcataaaaagaaacatactaatcccaatcgttaatcctgtttgaaaggatatcaccttcctaaaattaataaagaggataagcatatgaataaacaacataaataacgtaattttctttataaagccgcctataataccatgccctctttcattaaacttaaatatattatgtgaaataatatacaaaaatccatatgaaaaaataataaaacagggaataaatgctacaacaacttgtttactcataaactcgtttggctcaccatttacattccaatgtactgccatacgatttggtaaatagggatagagaaatagagtaagtaaaagacaagcgaaaaatattccaagtacatacttatatttgatcaagtgattctcacctctcttttctcttaacggcttcgcttcttttagagaaatccctgcaaaaatctacttttttcaagttaaaacttatactttacgcattttctttttgaaattcttttatttttttatttaactttgtaggaaacggcacatcaacttcaattgcttctttcgtaattggatgcaagaaatttatcttcatcgcatgcaatgcttgactggacatatattttgtttgtccaccatataatacatccccaactagtggattaccattatgactcatatgaacacgaatttgatgtgttctacccgtttctaattgtaacgttacgaaagtcgtgttttgcttcttaaaatacttttctactttataatatgtgatagcttggtcaccttttggagaaatacgacgccttgtagcatgatggcgatcccttccgatagcagcatcaatctttccttgtttcttctttactttcccttcaacgagcgctgcgtacgttcttttaatttttctttccattaatagacgatccataattgcaccagcaattctatgcttagcaaacacgacaccacctgtcgtatctttatctaaacgatgaatatgacgcaccttcgtctctaaaccttgcatttgaaaatgaaaagcaacaagatttgcaagcgtcccggttccacctctttcagcagggtgtgtgtccatttgctctggtttatttacgataagtacgtgatcatcttcgtatactacatgtaattcaccatattctggatctacaccgtactcttcctccgcaaacatatggacttgtaacttatcgttctcttttaaaagctcattccatcttctttgttccccgttaaccgtaacacctttttccatacgaagctgatgtaatagctttttcggtatttcccattctacttttaataccgattcaatacttataccattccatttagctggaacgataatttcacaccattcgccctttttctttgtttccatactgtttatcaccttatttctattgattctctcattgtaacggaaaacacactttgatgcactgtcaaaaatagaggacagtcttataatagactgcccctcaagctctaagtcttttcatttctaataatacttcttcagctttttgttcatacgataaatctttaaagaaatccgccaaccttttataatcattgtaagcatctaataaatcgtccatcttttctattttcatcacttgttgtttttgtttcatttttactggatagcgataacctgatacttcttgtattttgtaatactcatcctctacttgaacgacctttacaagttcttcctcttctgcatccatcgtatacccgtcaaattctctaagtagttcataaatgatatgagtccattcatcttttggataaaatcctttttctaaccgataaccgacaatgcgatacatatgcccatcgttctcggcaaactgtactgtatcatttaacttaaacttaaaataacgaaacattgccttcacctacttattatgtaatgttcttatcacatactatttgcaaaatgtaggctttgctattcataaaaaatgttcatcatattgatgagcattttttacgatgctttttctcgtttttttcgaaatggtaaccaccagttccagtctccaaataacttcattaagcttggtacgagcataagacgaataattgttgcatcaagaaatattgctaatgcaacgccaagacccatctgctttactggtaaaatatcagtaaatgcgaatgcaccagttacaacaatcattattaaagcagctgatgtaataattctacttgttgaaacgagcccttctaacgttgcttgatcgttatctcctgtttcttcatagagctcatgaatacgtgaaataagaaatacttcataatccatactaagcccaaatacgaggccaaaaatgaagattggtaagacaaacagaaccggactcgcttctaaaccgaaatgaccaccttcaaataaccaaacaacaattccaatggttgcacttaaactaagtatattcataacaattgccttaattggaatgagcatagatcggaatgcaaataataatataacaaaggtcgatccaaatataacagacataccaattacaactttatctttaatttcatcttctaattcttgttgaaacgtcgtcattccgcctagataatacgtaacatccgtttctttatagttctttttaaagtcacgtacccactgttttgcagtctctgtacgtggttttgttttcaaaaagatttctatcgtcgtcttattcccttgcgtgtatgcttcaaatacaggagttagtttcgctgattctggcgactgcaatattccaacaacttgatctgctttcattccagttaacccgtcgtataaacttcttacttcatgtactttcttatcatcttttaacttttgaacgacttcttctatcttttgtagactttctttttctttcatatcttttttcgtctctacaactaacgtaacatcagcgtgtgttttgacagtttcattaaatgcttcttcatacttttcatatgcaatccttgtatcactcttttcaggtaaagcttcaataccagggaactgcaaattagctgtacgtaacggtaataagcaaataacaataaatgttgtaacaacaataatcattgcaattggatgtttcatcacaaattgtgcaaatttacgccatgcttttgccggcgtatgtgctacttgattcttttttaatattcttttaccgattaacgataatagtgctggaagaagtgtgagtgagaataaaatgctcataatgacaacaatcattccgctaatcgcgacagattgaatataatctatcttaaagaaaaacaaaccagataatccaacaaatacgcataatcctgaaaatacaatcgcacgtcctgccgtttgatatgtaattgttatcgcttcttttaccgttcgtttagcaacttcctctcgaaaacggttcacaaataatagcgcaaaatcaatagataatgcaagtccaatcatcggtgcaacatttaacacgaaaatagatagttctttatcaacaccgatgaaatacaatatccccatcgtactaataacactaagcgccccattcaaaatcggtaaaattgatgccaaaagactaccaaacgaaaatagtaatacaagaaacgcaattggtaatccaatcatttctgctacttttaaatcattttgcgttctttcattaatctctttattaattttcggaaatcctgtaggtgttacttttaatgctacattactttctttctcaatctcatcagcaaattgtaatgtcttttccattctttctttatttgttttcccggaaaataaaattgtcgcataaccgatgtcatcttgtagcatttctttattttggattgggtgatggaaagattcatagttctctttctcttgaacattctttacaatttcatttattcgctttttaaattcctcatgcgaagcatctttatttttctcaaaaatgagcagcagcgtatcttgagacttcttaaaatctttatctaaaatttctttcgttttttgatagtcgccttccgtttggaaaccgtcaccacctaatactcccggtagctttggagcaaaaatcccaagtgcgattgcgagcaacagtaacgttacaattacggtataacgaaactgatacaaaaaggctcctaacttcccccacttatcaactttatgtacatttgtcttcacacattttcacctactttaaataattcaattgtcacttatactgtatcacatcttgatataaacaaaaaacgtctggaaaaactataataatagtttttccagacgtttttctatctctctttattaagccctaatctctcagtaagtaaacgatggtagtaaatcgcgataattaacaaaataccacctacgcagtaaccagctaaaatatcagttggataatgtacatttaaaatgactctacttaatccaatcgataaaattactatacccatcaaaattgttgtgacacatttcccagctacacttttcaaattagcagcaatgatataagtaagaaatccaaatgtcataatcgatagcattgcatgtccactaggaaaactatatccaagtgcatctagcgcttcatttaatgacggacgttctctctttacactctcttttatccctttattcacaagatgtgttattaaaattcccattggatatacaatcatcgcagcataataacgcttcttccaaaaaacaagcaaacttataacgagcgtagcgactatcccaattgctgatcccaattttgtaaagtacgagaaaaatgtaagagaactttccgtttgtagccctcttactaatccacggacatatgtatccatcactgtaacgccacctgcatgtacgcgccaagcaacaataccaaatacagcaaataacaaaccgatacacattacctcatactgatgtaacttcttcttcaaacgatttcctcctactatgaaaaaatgcgatttctactttagaaaccgcatttccttacttatttaccttttgtttttagctctgtccagtaacgatcatagtcttttaacttatcgtctacatcaacaagccattctgtacgatctaactcttctttcgttaagaaaatcatgtgattatcacggtattctttactatgaagaggatgagctttttcatttggattactgtaaccaattgactcgtagtttttcacacttactttttcatctagtaagtagttcataaatttctcagcaagctctttatgttttgcaccttttggaattgctaacgtatcagcccaaattgtgccgccttctttcggtacaacatattctacatctttattatcttttgcgataaatgctgcatctccagaccaaactgttccgatccaagcatcttctgtaatgaatttttgtttaatgttatctgtatcaaatgctaataagtttggaagcagcttctttaaatcatctgctgctgtctttaattgtgcatcgtctttcgtactgtttgagaacccgtgcttcttaagacccactcctaatacttcacgagaatcgttcaataacgttacatgtcctttatatttctcattccataagtccgcccagcttgtaggtgcttctttcacatactttttattgtatgcaatccctgttacaccccaagtgtacactaaagaatatttattctctggatcaaacgcaggtgttttgaaattagaaaccatattttcgatattcgggatattctttttatctaacggcgctaataagtccattttcgccattgttttaaccatgtaatccgacggctggattaagtcatactttgcgccaccagcttgtaatttcgcaagcatttcttcattacttgcgtacttgtcatagttaattttcacattatatttcttttcaaaatcttttagcacttgctcatcaaaattgtcagcccagctataaatatttaattcttctttcttttcaccacaaccagcaagcacaccagcaacaaggctaaaactaattgctgcgccagctattcttttcattaatttcatcggtttattacccccttgtactttctatatcgttcgtattataaaggaaggtgtcctccagagttttcttcaccatctgcacctttattccggaagatttcagatagaaccattaatcctacgatagcaacaattaaaattgtagaaagagcattgatttctggtgatactccgcgcttaaccatactgtaaatgtatagtggcaatgttgttgatcctggtcctgatacgaagaaactaattacaaaatcatcaattgataatgtgaatgttaataatgctgccgaaataactcccggtgcaattgctgggaacgttacataacgaaacgtttgccaaggcgttgctcctaaatcatttgcagcttcttctaagtcacgtcccatacttgaaagacgcgcagctaaaataacaacaacaaacgaaatactaaatgtaatatgtgcaataataatcgttgtttgtccaagttccattcctaactggctgaaaagaattagtaaagataatcccattaaaatatcaggaattaaaattggtaaatatacaaggccattaatagccccttcaaaacgatatttataacgatgtaaagcgattgcaaagaatacaccaagtaccgttgtcacaatcgttgttataactgcaatcgtaatactatttacaaatgcatcaataacatcttgtttttgaaataaatctgtataccaatggaatgtaaaaccttcccactccgcattaatgcgagagtcgttgaaagaatagaccattaaaaccatcattggaaaatacaagaataacaaaattaaccaagaataagaaactaaaaacttcttcatctttgcctattcccctccgttctcattatatttatatactttcgttgcacgataatataagtaaattaacagaacagagaatagaacaacgataatcgataacgcagatccaaacggccagtcacgtgcacctaagaattgattttgaataacgtttccgattaatgctactttcgatccgcccatcacgtctgatacaacaaacattccgatagaagaaacgaatactaaaatagaaccagtcgcaattcctgacatcgtcatcggcactgttatattccaaaatgcctttattggtgttgctcctaaatcataagcagcttctagcttacgcttatccagctgctcaattgctgcatacactggtaaaatcataaatggtaataaagaatagaccattccgagtattacagaaggagtattatataataaatttaacggttcactaataatgccaagctttaataacaacgtattcacaagaccttgtgaacgtaaaataacaatccatgcgtatgaacgaacaagaaagttaatccaaaacgggatcgttgccaataataaaagaatagagcggtatttgcggtcaacaattgtaattgtatacgcaaacggataaccaattaataaacatattactgttgtaataactgcaattttaacagtttcccataacgttcctaagtataatggatcaaacacacgggatatattctccagcgtaaattgcatttctactgtcccgtaagctccgcgctgcatgaaggcgaatcctaatacgaatacgagcgggattaggaagaaaattaacagccacgcgactgtaggtagtgcgagtaatttcccttttttcaatttaaggtcacctcgtcctcttgctcccagcctacatatacattatctccaatgctccactgtgctgcctcttcagcagtttgatatgccattagtaattctgatgttttctcatcacgtacataaagcttctccatatttccgacaaactcgatatcttcaatatgtccaagatggtattcttttaaaattgactcttcaaccgaacgtacttttacattttcagggcgaattgctacatagccttccccgtttttcacaatattattttcaccgatgaatgtcgcaacgaacaatgttttcggcttattgtaaatttctttcggtgttccgatttgttcgatatgtcctttattcataactacaatacgatcgctcatgctcattgcttcttcttgatcgtgcgttacgtatatgaacgtaattcctaaattacgttgtaagtttttcaattcacgttgcaagtcttttcgtaacttaaagtcaagcgctccaagtggctcatctaatagtaatacacgcggattatttacaatcgctcttgcaattgcaacacgctgctgttgtccaccagaaagcttcgcaggtttacgattacggaactcaagtaactgcgttaaacgcattgcctcttcagcacgctctttctgctctgctgctgatactttctgcattttcataccaaaacaaatattcttctctactgtcatatgtgggaatagtgcgtaatgttggaacactaggttcatatgacgcttatatggcggcaaatcgttaattctttcatcatctaataaaagattccctttagttggagtttcaaatcctgcgatcatacgaagtaacgtcgttttcccgcagccactcggccctaaaattgttaaaaactctccctctttaatatctaaagaaagaggtgggataatcacttgatttccaaaatgtttttcaactgcttcaactttaataatctttttcattttcccgtcctatctaccttaaattttaaatttttatattcatgaataaatatttatgttctatagactattttttgtttcgatccaaacaaaaatggttatttagcaagcgttcgtttctattctttatgtagtatgtttgattcattttcgcctgatacataacgtcgaacagaaaaaccccttccattgcgaaggggctattatcatacggctacgcctactgataaacaccatcatcattttaacaactttcgtatgaattttaaagcactttttgtagaagagtaacgaattttcatgtcgaatgctgtagattgggctaaaatgcttttataatgtgaaaaagtccgaaaactttctttcccatgataaccccctaatccactacttccaacacccccaaaaggtaaatatggcgtagcaaggtgatagacaacatcattaatacagcctccaccatatgaaatattactcgtcactttcttttgtacttctttatcttcagaaaatacatataacgctaacggcttcggatgttgctggattgtgccaattacattttctatattgtcgtactctatgattggtaaaatcggaccaaaaatttcatcttccataacagcatcttgccatgtaatatccgctagtactgtcggttcaatatgtaaagtatctttctcatagtttccaccaattacgacttgaccatcttgtaagaatccacataatcgttcaaaatgacgctcacttacaatacgcacgtaattttcattttgtaaaggttctttactatactgctctgtaatttcatgtcgcagtgcctcaattagcttttctttcacggaagaatgcacgtacatataatcaggcgctacacacgtctgccctgcatttaaaaactttccccaaacaattcttcttgctgtcatctctatctttgcatctttatgtacaatacaaggacttttcccgccaagttctaaagtgagcggcgtcaactgtttcgctgctgcttccattacaacttttccaacgccaacactaccagtaaagaaaatataatcaaacggttccttcagcaaagatgtactctcttcaacgccaccttctactaccgctacaagctcttccgggaataattcatctaacattctcttaagcacttttgaaacgcttggcgttaactctgacggctttaaaacgattgtatttccagctgccagtgctcctacaagtggtgcaattgctaattgaaaaggatagttccacggtgcaataataagcgtcacaccatacggttctggcactacttttccttttgatccaaaatgagtaagtgctgttcgaactcgtttcggtttactccacgatgacatatgtttcaattgaaaggaaatctcttttaatacatatccaacttccgttgtaaacgactcgtgaactgacttatttaaatctaatttcaatgcctgaaatatttcttcttcaaaacgctgaatgccttcataaagcttcttcaaattattctttctcatttcgatgcttctcgtatgcccttttaaaaaatattccttttgcctacttacaatagaggaaatactcattcactcaccttctcccactatttttatccaattctttcattatttatataaacttcatatataacaaatttctattcttaaggttacattatatatgactttttcagctatataaaattcattgctcacaaaaaaactaccgaaagaaaatctctcggtagttttacagtattaacgatataaacgaacagcacctgcagaattatcatcagcttgtcctactacttcaaatttcaaaccaagcttcggtaaaatacgtcctgcatctggaatctgttgattaatatacgttttagaatcatcaaacttcggtacgcctgctaagccatcatacgtaaatgttccacgcgttggagatacgactttccaagctggcgttttgtcaaatgaaaacgctgcatcagcgatttggaatcgtgtactactcttaactgttggtttaccatttaaagtaccaacaattgcttctggatgagaatcaactacaccaaggaaaccgtgtcctggatgtacaccaacccagttatctgtataagctgaatctgcataccatacaaccataccagtgttaaatactggaccgcgagcaaatttcaacgcgttatctgccccagcatagtttctccactcaacatagtagttatgttttttcttctctgttccgttagatacaacgaaaccatctaattttaattgtggtgtaccttctgcgtcatcagagaatactactttaccatctactgttaatgaagcattatcaagagcgaatccatttaatgctaaaccaccatcagtaatgtaatcaaatgttaattttactttcttgcctttgaattgacttaaatcatatgatttgtcaatccattttccatttgtcgaatctgcatttccactatttgctttctcaccaagtctttcaattaacgtttgtttaccatcttctgttacagcgtgtacttcaaggaaatcataacctgcttcaatctcatataatgacttgaaatcaaattttgcactcgttgcattcgttaaatcgaacaacggtgtttccatcttcgtatgaagatcgtcaccttttgtgctgtaataatattgtttaccaaatgctggctcaattgttttaacatctttatccggtaagttaacacggatcatgcctggtcttgctgatttcgtaacactttgatccaaatatgtcgctagaccgatacctttatttaatttctcgtaatctacttctacgatatttgcccagttaccaccgattgttttttggaaaaactctttattttgtggtgagaaactcgttggcgtcgttccagcgattttaccagcccagcttccgccactcataatagaccaagcttcaatcggctcaccttgaccactatattgtgtatcgtactcatctggaagacctaaatcgtgaccatattcatgtgcgaatacaccaactgctccatcttctggttcaattgtgtagtcgaatgctgccatctttccaccccaatatggtactttcgcttgtgtaccttcaattgggaatggctttggtccaactgtccaacggtgcgaccaaattgcatcatcgcctaatttaccaccgcctgcttcttgtccaacacccgcatgaataatcattaagtgatcgattaaaccgtctggttgatttttattcccatcaccatttacatcgtattgatcaaattggtcgaactctgataaatcaataccactatctacagctgcttttaatgcatcttttactaaatcacgtggcccttttggtcctttattatcatggcctccgcccggagcatctgcaccgtaatcagcagctttaccaggaactgttaaccattttgtaactgttccgtctacagtataactaccaccagattgctcttcgtaatattgtttaaacgtttcaattttacttccatcatctaatgtgaatggctcgttgccgaataacattttttcataatgttctttattaaaatcgttagaatacatatatccaggctctttgtcgatattattatgtttaaagtcagcgtactctacaagtaaaacgagtactttgtctttacgaacttcaccgttatagtctttttgtttcgctggagaagttggtactttaccatttagaccgcctttaactgggcctgtcgctgcaggtgtgcctgttgctggttgatttaatttttctttcgtgtctgctttcgcatctttcactttctttaaaaagtcggatgcatctttcgtaagttggtccccattcgctgcttctttcccaggattttcaccctttttgttctctacatacttttcgactgctttctttgtttctgtctctgaagccttcgaatcaattaccccacgtttttttaatgcatctgctaaacgttcttccggaattaaatgatcatccactgggctcgtagctgttttattcacaggcgtttcagcatatgcagattgagtgccagctccgaatgaaaggcctaatacagctgtcaatgcgattgatgacaaaactttgaacggtttcttgttcatcccttatttcctcccctaataaataatatgtattacaaattaaattttattaaaaattcaatattttttcaatatttagtcatattatgtaatgtttttaatatatttgtaaaaatttcatagttagcatacgaatatatcacaattcaacaatgttttctgaaaatattgaaagtttttatcgaacaatttataatttccatagagggagtttaatggggattttatctttgtttcatctacacaatatttgataattcactatataaaacacaaaatcggatttcattatcatgtattctgtagcagcaattatgaccgataattagggaggaattacatttgtacaaagataagacagacgcactggatcaagaatggattgatttaatacttgaagctctagatgccggtatcgccatgcaagacatcgagcaatttttccaacgtatgaagccatccagtcaggctcaataggtttgttctttttaacgaagtttatgttataataataacatcataagacaactacatattgatagaaaggtgcgcaaatatgattggagaacgtataaaacgccttcgtttacaaaaagggatttcattaactgaacttgccgaaaaagctggcgttgctaaatcttacattagttctatagaacgaaatttacaaaaaaacccttccattcagtttcttgaaaagatcgcagcagttctacaaattccagttgatactttacttcatgatgaaacaacaaaggaaactaacctagactccgaatggacacaactcgttaaagatgcaatgaactctggtgtctccaaagaacaatttcgtgaatttcttgaatttacaaagtggaagcaaaatcaaaaataataatagaaagaagtgcttacaaccagcacttctttttctttataaaaaaaagcgggaatacccgctttttttattatttttcttccccagcttcttggttagcattgaatgtccattctaaattcaatgtatcaccttggaagatattttggtcttttccatcatctacaaattcaaattgtacccatagataatcctctgtaccagctgctaatccacccttttctccccactcaggagcaaagatatctttagctaaaagatctggatcaactttttgtaagtctgctaaagttgtttcgtatacaggctcactttgtttatcccagttccaaaggaattttactttaacgtgcttaccaaagtcttcaccagcattatcaccttttgcatctttaacagtatactttgttgctaatttaacgtctttaatagttaacgaaccgctgttttgtaataagaactctttcttaacagaatcccctggttttaaatctttaatatctacaagcgtcttagggtttaatgtaaggtctaacgtcccagctgcaaatgtattgtttgatacttctttatcgctaaagaatgcaaatgttcctccaccaattaaagctaaccccaatgctgctgatgcaactcccatacctaatttctttttcagactcacaatcaattccccctagcttttttttatatttttatcacttatttttcaataagagatgtaaagaaaactatattagcttagctaatatgtgttcttttttaaaaaccttatgttcattataacgaacaaccctatataaacacaacacatatttattaatattttcagttatttttatttctcaatatcatttagacttttcagaaaaaaacaatgataatttataacttttttcacactcaaatcatttaatactataagaaaaaagaaaaacaaagaggtgagggctaacgttccctcacactcgtataaatattactagtcttgcttattcgttcactctctcttacaccacattcttgttttccggctgtttcactaaagcagttactccgctttcttttgctcttctagctttttctgttcttctgctttcttctgttcttctgctttcttctgttcttctactttcttctgttcttctgctttcttctgttcttctactttcttctgttcctctgctttcttctgttcttctactttcttctgttcttcggctttcttctgttcttctactttcttctgttcttctgctttcttctgttcttctactttcttctgttcttcggctttcttctgttcttctactttcttctgttcttcggctttcttttgtccttccgcttcaattgcaacgtttaattgttgctgaagagcctgaatttgctcatcaatagctttcaagctaatttctttctcaatatagtcacgcttctctttgatactgcggaagccttcatttacatatatggacacttgctgcatcgactcatctttatttacctttaattcttcttgtatttgattgtaaggagcttctatttcagtatatacattttgcagggcttccttctcagcaacaattttctcacgcccttgttgccatacagaaatcgcctgttttatttcttcaatagaagttgctttcgattttcccttcatcgttccatactcacgctcaataaactgtttatgtttctcagattgctcttttaacgtattaactgttttcggaaatataattgctgtagaaagcgtcgcttctactttcgtttcatgaatgaacgccgcttctgtatgcgtcataatttgagatcctaaataaaacgtaatagaacacatacacggcaatataagcatctttttaaaattacgcggtcttttcagcatcttaatctctcccatcgaacattacgttctttatacagaacattatctatattatagtaaagaactattaaaattgatagacaaatactagaaaaatagaaaaagggctatccatgtgatagccctttttcttattatctttcttcacctgctgtttgttgtgcatcaaacgtccaatttaattgtaacttgtcgccttggaattgattttgatcttttccattatcaacaaactcaaatttcactttgaatttatcagatttacctgctgaaatacctttttcatcccagaaccaagccgataaatcattatctacagctgtaagtgtgtcaccttttaatttatctaaagtagtttgtttcacaattgtctcatgcttatctacattttttaagaatgttactttaatatgtttaccaaaatcatctttattgtctttctttacatcttctacattataatctgttttcagtagaacctttttaatatttaaagagcctttattttctagtttaaattctttttcaattgtatccccaggttttaaattcgatacgttaacaactgttgatggatttaatgctaaatccagtgttccagccgcaaatgtattatttgacacttctttatcactgaaaaatgcaaatgttcctccaccaactaaagctgctcctaatactgctgatgtaatacccattcctaattttttctttaaagtcatgtccatatccccttaatatatatttgttaacttcctaaacggaaagtataaccaaacgaactagacggattgttctacttttttatctttcttttctccgtcaatgctacgaatagcaccaaaaatagaaatcgcggaatacccaagtaaaaagactcctggaataataagaagtaatgctgctcccgcttttgaattcgcataattcagtaaataaccaacatacggaactgtaatatctgcatactttccaactacattttctgcaagtactggctctaaatctggtccgttgttgttatccccttttgtttcatacattacttttccatttgtatctttcacaccgataatacggtgagtgataattttttgatctttctctttaaaggtaataacatcacctttttgatatttagaaccatctttgtttggttctattgcaatgattgatcctgttaaaaacgtcggctccattgatcctgaaagaacgctcttaaattgatatcccatcactgtcggatcaccaccgcttgcttttgaagaaataactacaaaagctaaaaaaaccatcaatgcaaataaaacaaatgagatcgcgttgctaattatcttccatattaatttcatcgtctctctccctctccgttgttttatattatttgaagtatgcaatatccgcttacgttctttaacaagaacacaagtaaatgatataacgaactttaagttattgcaataagaaaatttacaattattagttatttaaaatatagaaaaaagactgtgccaaaattttacacagtctttttattagtaatttatttaccttctgatttcattccttttgtatttcggcgcaacactacatataaaattgctccaaataatataatcgcacctatcccaacacttattactttcacatttgagtcttttacttcaggcatagttgtatcttttttaggcatcgtaaaagtgacatcttctgttgaaagaacatttaccgtcgcaattgtttgattatttttcgtaatatcaactgcaccaactacctcaccacgatgtattcctttatgatataaagattctttatctaatgaagccgcccggaaaatagttttcacatttttcccttcatctttcttaagcataagctccgcactttgttccaactcagaattaacatctttatttaaatatgttgttttttgatgccaattatgtttatcaagcaccatttgcttcgtaaattgaccgaaagaatattccgccatctgcttcaaatcttcataaatttcaggtctttgagaagccattactacgcttataatacgatttccatctttctcatttaataaaacaagtgtattacgtgcttcattcgtaaaccctgtcttaccgccaatgctatatggattttcaaaaaaattagatttattaaaaatagacaccgtctgcctagacgtcgtaactgtcgttcttttcgtattcatcgcttgtaaaatttcaggatacttttgcacacccttcgtaatcatagccatatcatacggcgtcgtataatggttcggatcatgcaatccattcggtgttacaaagtggctatctttcgctcctaattgcttcgctttctcattcatcatattagcgaaattctcaacactcccgccaatccgctccgcaatcgcatacgacacatcattcgcactcagcaccattaaaatcataagcgcagtatttctattaattgtctctccaggttgaaactcaatttgataattactcttctcttgatctaatgctaattgtgaaaatgtaaattggtcctctggctttgtatgctccatgagtaaaatcgctgttaacaccttcgtcgtactagcaggatatgctcggtgatatgcgtttttatcatacaaaacatctcctgttttcgcatcaattgtcgttgcaaactgactaaaaacattcggtccttccgcaggtggtggtgcaacttgttctggatttactccaatattcgtctcagcacgcaatgttatgggcgtcaaaaaaaacgaacaaataactgtaataaaaaccaaaattttcttaaaatttaccatatgactctcccttttccatttactccttaacaaaataataaatctaccaatcatatgtgatttgtattatattggaagaaatttcactattttttactatatcatacttttacgataaagaacataaatatacaataaaaataagaaggaattactctttcttatccttctcatcaatcaacgaatctattaacttttgactagcttcctcgggcgtaatctcatctgttattcccataaacgaccaacctttagaatcaacccactcaacaaactcttgtaaaaattcatcatgtgtaacatccacatcaagaatcgatccattaatcgaaatcgttctatttttagacacgcgcatcttgaacgtttttcttaccattacaacttttctccctctacttctgaatatttataaagtgaaactttcatcaaccctcacgaatcggacttttacgggcattccgacccgaacctaacttctttacttttgctgaatttcgaggtaagggatcttactgcccgcaaatagcgagataaaataatcatgtatctctgttatacatgattttcagtaaattgtaaaaaggatatattggccaatttaaatagcaaaaatgaaaatctcttacctatgtaaacgtaatacgacatacaattgctcatacattattaaataaattcataaaaacatacagtctaaaacataattgacgttgtttaaacaacgtcagttatgtgggtttagttgagtaagccattataaacttttggaagatattatctaaaatagtatactaaacggataaaggatatttgaataaagaaactgaggccttctatttagctggactcttaagtggtagacttaaagactaatgccggaattcatatttaatttctatttctgtacataatatcggaagaaagaaggtagtgctgtgaaaacaacagaaaattttactgacagggccgatatgtatgcaaaatatcgccctagttatcctaatgaatatattgattacttgcttccagctaaccaagtgaaagggaatcggattgtggctgatattggttcaggtacggggatatttagccgccagctgcttgaaagtggtttacatgttattggagttgagccaaatgatgatatgaggaagatggctgagcaatcgttaaaactatattctcgttttcaatccataaaagcaactgctgaaaataccactttaaaagaaaatagtgtagatttagtaactgttgcccaagcatttcattggtttgataaagaagctttcaaaatcgaatgccaacgaattttaaaacaaaaagcaaatgttgcacttgtttggaatagcagagatttaactagtccacttattaaagagaatgcagaaatttgccagaaaacctgcccaaactttaaaggctttagcggtggaatagatgaaactccagaagtatttaacagcttttttaaagatggaaagtatgagtttaaagaatatcaaaatgatttactttttgattatgaagggtttttgggaagaaatctatcagcgtcttatgctccgaaagaaaatgacgaacagtataaaaactttatttttctcctatcagagctattcgaaaaatacagtaaagatggaaaaattattctcccgaatttaacgcgaagctatctaggcaatgtataaacggcctgatacaaagaggctttgaacggaattaaaacaagcctaacccctccctaagtgtagaacgaggttaggcttgttttgcattttaccacatcaaattcaaatgactttcgtacaataaagtagaatatattagaaaacaccttaaactgaggaggaactcaatggcgcgttgtacgtattgtaaaaagaagtggaaagtaaaagacatatggtcgatactcgtgacatttgaaaaagattgtccgtattgttttgggaggcaatatatgtctaatgatacttttcatcaagctaacgccgctttaccactgttatttttatgccctttaattgttgatttaagcgatgaaaatcctttagataaataccggaaataatataacagctacattcaaaaactattttctactgaattttcttctcatcattatcccttcatacattacgagcataatcgcttatactttcccttttgaagatcctgtatctcagcatgaagggcgccccctggacaatgtttatcaattatgactttaataaacattgatagatttatactgttaaacataaaaaattagcattagattccactcaaatattaatcgaaacccaacactgcttgtattatgcatttttgcatacagtattgttttctcttgtaaatagataataatggtatataattaaatcaacgttttaccaataaaaggtaataaaagtagtgggataagcaaataaccaaaacgtattaacagatttgttctatgtaaatcatgatacatatatggaatcaaaactatgaaattttatgtagtgattagattactacaagatgaaagattcatagcgaatacacttaaggaaaaaacgttccattagattaatgtgatatctatcgaacgaattgagaatatacttagggggaatttcaagtgaaaacattttgtaaagtattattaactggcgcattagctttaggcggtttaacggttatgaacattgatacaccaaaagcacatgctgacgaatgggatggttgtcattacatttgtggtcctggtgaaacggtgaacggtgttacagttcaggtacactctacacaagttacttttggtaacagcgtaattgcaagaattacaaatgaccgagctgaagaaattcattacaatgtcagccttgaaaagaaatatggcgatagatggggagaatttgaaaccaacttccgttggcaaaatcaatgggtcccagctggaagcaatgatgaaattgcaactttcacaggatatggcgatgatatttatgaagatggaacatatcgttataaagtcgaaataaaaggcgctgacggttctattgatacaatttacacagcaggaatgacagttacaggacgatagcttatgaacaagctccattatttatgattgtatttttgaaaatatcattgataattgcgttgatattattattaaaataagctcttcggggcttatttttttatacaaaaattagaatatgaatattcggaaaattaaacctttacaccattaaagtttgttgctattataggaatacatcaaatgttacaatactcaacaaattgtacaaattctccgattacacgaatgaaatgaaaatacattgctgatggtaacatttatagttgggatcccgtagctcagcagggagagcgccaccttgacagggtggaggtcgtgagttcgagcctctccggggtcatatgaaaaaccccttgatagtcaaggggttttctttatgtagcaaataaatgattattattaaaactaaatttttccctacttcttttctccattttggagaaagacataaattatattaattatcgctctacgttgttcgctagaactcgattctttactctcttttgggagctttttaaaattctctttgaaaaatagcctaatacagcaatttttatatttatttatataaatttctcaacaaaaaagatctacacagtttaactatgcagatctttgtaaatttaagtttagaaatgaatagacgaatcctattttcgccctaatttgattgcctttttgatattactaaatgcacctttaccatatattaatacgccaccgcggtaaacacgactcgttaaaccaatcatcatacatattgttgcaattagaattgctaatgcaagcgcaatctcccatactgggatattgaggaatccaattcgtacaagcataacaataggagtgaagaaaggtacataactagtaatggtaacaaccatgctgcttgggtttgacattccataaattgctatatacaaagcagcaagtaacataaacatcagcggcataacagcttgagaagattcctctatacgcgtaatgatagagccaaatagacaagataatgagccatataataagaatcctaatgtgaagaatagaatcccataaaacactagagttggagcaacagaatttaaatcaatactatttaaaatatcatttttcgaatcattaattgctgttttatatccaacagttgcgaccaagccccaaattatgatttgcgtaataccagccaataatgttgagaatagctttgcatataaatgtttggtaggcgaaatacttgaaacaactaactccataacacgagaagatttctctgttgcaacatctgttgctaattgtgcagcatacattaatatcattagataatttagcatgataaagacattaattaaaatccctacaccctcagtatgttctccatctttaaccttatctgaaaccgttttggtatgaatttctactggcgttgttaacacctttaattcatcttgagatagattcaattgctgggcgaaattagaagattgtatttgagataaaatcgtttgaaccttgctaacatcttgctgatttacatccgtctcagttatatacgtagcctttaattgtttattattcaattcctctacaacgattgcatatgtataatcaccatttttaacacctgattctgctttttgtttatccgtgctacgtttaacttgtatcttactatcgacatttttaaacacttgatgaatggttgaatataattcttctttttctgtaacaacaacaacttgatcgtcctcgttacctgcaaacaagttataaatcttgtcaaaattcatcaatcctataattaacatagaaactattattgtaatagcaaaatatgattttgatttcactttagatttatagttttgtaaaaaaattgtccagaaactattcattttgtgcacctactttcgcaataaagatatcatttaatgtaggctcttctactgcaaactttttaacataccctaattttgttatctctttaaataaaacatgtgacacttcttcatatgaaattttaagagtaactgcatttttacgtttcttcatactttctacaccttttatttctttcaaatggtcaaagtcatgatcgccaacgattacaacgttctttttaccaaaatcacttttaattttggcaatgtcaccctgaacaacaggtacacctttgtgcataatacaaatgtgttggcataactcttccacatgttccatacgatgtgaactaaaaagaattgacgacccttgtttttgcatatcaagaacagcgtcttttaacatttcaacatttactgggtctaaaccactaaatggttcatctaaaattaagagttcaggcttatgtataatcgctgttatcagctggattttttgctgattccctttagaaagttctcctacctttttgttcagatgctcagtaatattaaaacgctccagccaatagtgaagttctttttctgcatctttacttttcatgttctttagttttgcaaaaaagttaacttgttctttgacagtcattttcgcataaagaccacgttcttccggtaaatacccaattttatctgtaacaccataatttataggtttaccattccatgaaatggtcccacttgatttcgataaaagtccaagtatcattcgaaatgtagtcgttttacctgctccattcccgcccaagaatccaaatatttcaccttttggtatctcgatattcaaattatccactgcaacatgctcgtcaaatttctttgttaaatctttaattagtaaactcattatccacacccttaattcccaagatgatttatttatacaattgtatatccatagtcaaccacaatattttgccctctaatggcatcgcttttatcagacattaaaaataaaatgacatttgttacatctgaaatttcaacaaattttctatatggaatttttttcaataacttatttccttcaaaggacttcaaatagctttcgttattatcgtttatactataggacagtggtatacaattcactgtaattattcattttttatctttcaaaaatgaataattaccaacaaatgttatatttcgcattataaggttagcataagatttaaaatatttaatatgcaattttgcatattttaacattcctaattatttacatagtgtttgaccatctttatttaaagcagcccccacattcacaaaattcacttaaaacaagaatttgtttatccatactttttctataatttttcatgaaagaactgaaattaattagtaccccctgttaaacacctaaatctgatacttaaactaactaatcttcctctaataaattgttttcttatttgacttcacaattaataatacccagcaggtatagtcacaacatcttcgtacacctcctcattaaagctgaaggaacactaattaaaatctggtccagaaattttacctttctacgttataggatccgcataagaaaacatagaatacagtacctcctctgttacaactagctgtatgtcataaaccaaaaaatcataatataaaatttatagaattaatttcttgagttcaaacctctccaggttcataaaaaagagacaccatatcaaccttctggtattatcccctataggtagacagtaaaaaaagagtccatctgatatgatggactcaatactgttttatctggaggggatttttttatggcaagaaaagcattttagcaaagaaaatgattgattttgtacatgcttaaacaagcgaaaatgtacatgtttatcttgacatttacacaccgtctactaaacgtttattgagatgtaaatagattgtaaaagcttccttatcatattcccaagttccttcaatataattctttttatttggatactcacctttaccatacgtttcaaatgtcttatcaccttttaaaatgagtgacatattgaaaccgtctgttccttggaatccccaattaccgattaattccgtaccatccttcacattcttcataacgttatctgtattaattccagctttcttatctaactctttcaaatctttcattgatactgtaccgtcaccgattttaatatccccttcaagatctttgaatgccttaagccagtaaatatctccttctttcactagcttttcagatttctctattaactctttatcagtcttatcacctttttctcttttttcttttctggtgaatacttcatttattaaagaaaaagactctctaaaataactaattgctttttcaaaatctttttgttggtttacatactctgtagggggatctattgactcaaatttatctaacactttatttaattctttcacactatctactatatctgatttctttttcttaccgtcaaaaacctctcttgtaatattgttatgctccgcaaacaacttatcaaactctactcctaatttatacactttattaggatagtcttcctttgaaacgttttctttcttactattagacttcgattcttttactttagactcttccgttttctcctgtttagaagtgttcgttttctcagaaactccacaaccaaataacaacatgaccggaactgctacccctagtagtttctttgcattcatgactaatttctccttctacttgaatagattactcttactatacccatcctctttttttatcttgtaattaaagttacaatcgcaataactcctaaaattggtccccaatattccatttttataaaaaatagcgagtgttttttgttaaacataactttttcaccagtttcggtatctatataaactttcccatctggcttattaatatatttacctaaataccaagacataacccctgatataataaacattaccgccattggccaactatggtcttgaaaatatgtagcgtcccccgttatagatccaaagatagccttacccaaaagagtattaataattacaataattgcgactaaaaaaccccaaccagaccaaataatcatctatttctcctcctaaagcgtacaactttgtactttatgttaatttgaactgcaaacgaaaatgtttaaaaaaccgaatattcagacgttaataattatatttagcttacattcgattctaactttaatgtcctaaatgcaaatgaaccagatataatttgtaaaattgtcggaataagtaaaaagaataatgacataaacaacataactataggaatcacaatcatacaaactccataaactttattattaaccttgtttactaaacacgataaaatgaacaaccctatttgaaccgttaaaataatagagtaataagctaaaagttcgtaatcaaccccttccataatattaaacgctacaactattaatattatggaaataataattcccaaaatgccaccaattaaacctaatacgaattcaggtgttcttttcaattcaatcccccttttatgaaccactaacaacttgtatatttttcccattcaccatcataccaaatattcactggaaaaactatacatacttttcattcttccttaccttacagtgaccttcttaccattatagatagcttgtagcagtcacaaaatcaaaaccttcaaaattactaaccggtttcgatacttttagaaagtagacataccccttgaatacaattagtattaacacatgaaatacgaaaggcttaaaaaggctttcacatgaagaaaggaagttgcacaactatggattttaaaacagttatgcaagaacttgaatctctaggtaaggaacgaacgaaaaaaatatacatatctaacggtgcgcatgagccagtattcggagtagctacaggtgctatgaaaccaatcgctaaaaaaataaaattaaatcaagagttagctgaagagctttatgccacaggtaactacgatgctatgtactttgcaggtattattgccgatccaaaagctatgagtaagtctgattttgatcgctggatagacggggcatatttttatatgctatctgattatgtagtggcagtaactttatcggagtcaaatattgcacaagatgttgctgataaatggattgcaagtggggacgagcttaaaatgtctgccggatggagttgctactgttggcttttaggaaatcgcaaagacaatgaattttccgaaagtaaaatttccgatatgcttgaaatggtgaaagatacaattcatcattctccagaacgaacaaaatccgctatgaataatttcctaaacaccgtggcaatatcatatgtaccactacatgaaaaagcagtcgagattgcaaaagaagttggtatagttgaagtcaaacgtgataataaaaaaagcagtttgttaaatgcttctgaaagtattcagaaagaacttgatagaggaagacttggtttcaagcgtaagtatgtaaggtgttaaaagtatgaaggtgtcaatgtaggagagattgacaccttttttgtggacattactagactaacggagctgcaagttaaagggaaccaatcattcatctcccactatacatctcaaacttcttctttcaatttatataccctatctcttttctcatcatctttgataaaaataagttttccttctgtaacaaaaccttctaatagtaaacatacttgtccatatgctttaggcttattcgtagtgaatctttcatcggctattttaccagatcgtattaatcgttcacatagctcaagcgcacttatttcttcagaatcaattaattctaaaatatctttttgtaatggtgataaaggggctggtaccttacatacctcagctacctccaccttttctttttcttcttcaaataaatcttcaaatgaaatttgattcattacacctgttcctttctaacaattgatttatataacatgaattgaattctataggtacgaaaactttaaatattagtcattgttatgtagtgcttacctcgttacatgaatttcaaactcatgtacatcatttcatatagtatattttgattataccaaatatacgttctgtcttctattgtagaatttttataacagaaatgaaagtaatagtgaacatttttcttctctttagttgtatagaaaactatgtaaaaagtttacataataaaattatagtgatctgttaaatttctacgcaaaaaagcacttgttgcctttaattgacaatcaagtgctttcagttcatatgtttttttagtagcataaattttgtaggtcttcgcttgattttatattacatctttctataaaaaactgcagtccaattatatctaacacttgggctacacttcatatcagacattttttcatataaatgttcttagtatattatttttgtaactttaaactagcaattaactcatctaaactatccgaaatctcttcaaatgaacctcgttcaaaatcctccaattcaaccttaccacttacattatctaaaacaactatcaaaccgttcccctctacacctattggagtcttatcaaccttattatgattgtttttatacccttctaaattactttcgaaggaatccaattcaatatttggtaatacaggttctagcctaatataatgattaccaataaatccatctaaatcagcaaaccaataagaattaaaataatcatcaattgaagtgtgcagtttaatttcaaatctttcctcaatcttcgttaaatcattcttattatttttttcaataggtttccatgaaatttcttcttcatcatccatttcaccctgatatataaatgaatcaacttcttcgttatatggcgttttaaataaaaaatctaaccctttatcaaaatattcttttcttaaattaaaatatttgctcatagcatccttcattaccaaaataatcacccttacttttctaagaatttttctaatagttcagcatatttttggtcatttccccaaactcctgcgcttttctcagcattatgaatccctcctaaacctggatgtagctttgagggtacagccacagcttgacctccaccaccaatgtgatgatgtattaaagtgtcattatataattcttttaaatcatattggggaaaatgttttctaaacgttggattgtttataggtgcgaatcctaattctattttttgtctatttgacctattaaacgcttctgggtacttctctaacatctctttccaataaaaatctttatcgcgtaaccaaccctctgcattggtgtttttttgccctttaccaacatagggcatctcaacagttaagcgaggatccgcagtatatttagcctctagcttacctaaatcagcaccacgatatgttctaataggatcattaatatcacctatcttcttaaccgtttcacccgtacccttactagcaagagaagcctctacacccttaatctcatcatctataatcttattacttgctgtatgatgcttattcacccagctttgtttagacgttattaaaccttagtcgccactttcaaaacttttcgatttggctgtcatatcatctatgctttttgctgtttttttccaatcttatccccttatgaattctggatttctctatacttagcaaatttgcaatagcataggtagtagtttattgaacctctctgttaaataaccgttctattctaaaataaaaaggggtatctcataagcaagtgaaacccgccacttataagatagccctttaattttaacgctctattaatcatgtaatttacttaagaactctgtgaatgtattagcaacaaaaaatacattttctcttgcgattttctctgcttcttctgccgtaatcccttcactttccatcagcgcttccttttcccatgcatcttcatgttcccaaaaaacaacaattggattttcttcatgatttttataatcaaagcaaattaaatttcctgctggatcaattccaaaaggaattacatctctaggtaaggtagcacggtagttattataatctcttacaatataatcactactctcctcatcaaaagaaagtaatgcaccaaaaactctttctattccttcaacatcaaaacaatatggtattacattagccccatgatttacctttgcacactcgatataatcttttggaaactcaactcccagtgattgacctattttctccacaaattcttccgtaaccgaatcatccgcatacttccattctaaattcttcatctaattccgcctccccataatctatttccacctaaatgattcacactatgaacttcttttattactaattgcattttccccggtatttgatgatgatgccatattaatccatctattctaggcaaaccatcatttatttgagctaactgctttttagtgaataattcttttgagatttcgcctttctcaattgcttcttttaccaatttagtacattccctaaattgatctgtatctttcataacatagaaatctttctctaactttaaagaaaacttaacatcatcccctttaaatattgggaatcctaaaatatcaaaatctactccttttttcacatgtgttcctcctgctaaaggcttatttaatatattatttttcgttttagtattcaaatatgtttctgttagttctacaacttctttaaactcttcaacactatcatacccaaattctttgatggtagtatcatctacttgttttaagaaatcttcaacactatcatatcccttaggaacaattgatctattaatcaagtttccgtctttatcgtaattatttttaattacttcgtcaatttcagatctatgaacagcgttacccgtacccttaaccccaccactctccaaattcgagatcctactctgaatactcgctttttaggcatcatgggcttcttggaatttcccgctatagttcgttccagttctaacgacacttccatctggcagtatttctacacctttaacgaatggggttacggagtccgcaccttttgctagtttaatttcaattatataatactaggaatttatgttagccttaattcataaaaaattacttcttataaatttaatccaagtttctcgttaccacatttctatattataacattaactcaatcgtatcttttaaagcttcatttacattaatagccttttaaataaaaaaactgaaagaggattaatccaccttccagtttcttctttcattattctatcggccccataaattgagtaattaaataaacatgctcgataagtttgactttttgtaagttttctactttttctggtccacctagtgcaagtaaaggtgtgtaaccaaaacattcatctatttcaagctttccgtatttatttaatgcctgctgataatgcttccaatccaatactttctctaaaaaataatcatctttcgtatttttaaagaaaaacttgaattttccagctactacatctaccgtaccttttcgatacttaagtaataataaatagttattttcccacacaagaatatctcccatacctgttgtaaaaattgggatagcttcttcataacggatataactttcctttaatatatctaaatatttttctgggtttattgctcttaagtatccatttaacatactcccaaacccatagcatttccataaatctattatttgatctggaactttccctgtatacttttcaataacctctgttgatggtttttcgaaagatataaaatcatttatattttccatagtatccccctactccgatttcaatctaacattaagatatgtcaattttttttcttcctctgataaggtgtcagcaactcgtctaatttccttatccacattaccaatcctgcttttccactgcgaacctattgatgaattaattctagaatcacccatgccagttatttttaatggatttccacccgcaatttgatctgggtcatgtaatgcagctttatcctttatccgctttaaagcttgctcttctgcttccctaaatgaaaaaccttcttccataaattcatcaattttatcttgcacagcttgttttcgtgttaatctttgagctgaatttgcttgttttgatctcccatattttaaaaattggttccgattctaaataaactcataaactgtcaattttcccagtccatcttcttggttttttaattgtcgtataaactcatcttcattatgtttccgattacgtttaaattcgattccaatttcgtcagtacgcgagctattattacccactccgctagttttattacttccttctaatttactatgcccatgagcaagttgataagcgtcatccttagttaccgtacttgcctttgaaaactttccagttacttctccaacagttgaaggaagcttcactcctattccagtatccaccatcctaaccgttactggaataggagtatttttcatagcatctagtgcattctttaaagtcttattttccctaggcgattgtaccacattatttctacgctaaaacacaaaaaagcacttgttgcctcaaatagacaatcaagtgctttaagtttcatctgtttttaagcagcataaatttgtaagttttgtagtaacagtatgacaccgtttatatgtggtaacaagtactaagttaaaacttacgagtttgtacgagttcgttagtttaactactttctttcgttgaactactaaaagaaaatttctattttcaataaaactacattctcgaactgtaatcaattgtaaatacctttttatcatctgatccttgaattcaaataaaaagtttttaatagaaataaaaaagcgcttgttgtctttcgtagacaatcaagtgctttaagtttcatctgtttttaagcagcataaatttgtaagttttgtagtaacagtatgaaactttttatacttcataacaaatactctctaaaaacttacgagtttgtacgagttcgttaatttaatatacattccatgcgtttatattcatcccacagtaaaatgtcatctcgcctaagctcgtacttctttttctattctatccttgcacgtaatactctatttaaagcagttacataaaaaccttgataagtattcaacttatcaaggttttagctctataacttataattttcccatagtttttttctcattatatgtgtctctaaatctgctaatctaacaggtatgggtaaccgactttctttattaataagcctcatgacaatttcagtacttgtctctaaatcaatccagttaccacatgaaataaaaatgggttttacacttttggttgttcttaaagctcgaccatatatttcattattaatgataatatccgtatacgatccctcttgattttcaggcatagtaaaatctacacctttaatctttaaataacttttcgctacaccaattgttggtttatttaaatagaaagaagcatgtgttgcaatacccatgtgtcgataatgcaaataaccattcccatcaaacatatagatatctggttgcttagttagtttttttgctgcagctttaattaaaggcaactcacgaaaagcaagaaaacctgaaatatacggaattgttatttctccataactgtacactttttcaacaacttcatgtgtactaaaatcaatgactacaatacagcatgtaccatacgttttaccatttaattcccaatacgctaaatctactcctgcaacaaatcgtatttcttctaattcaaaggtatttctaagttgtacttttggtaagaatgcacgctgctcatttttaaattcctctattaaaggttttaatttagaattatccattgcaatcacagcgtaaatttttttcaataaatagtaaattctctttggctgattcaagattttgtttttttatatattcttgttgatcccactcagcgcaacataaacatatcgccgcatttaaatttctcttcatatttccctctccactttcataccaaatttagtgcatacctcctgtatgtcttctaaccatacttcatttaatgaattacaactcaacatttcaactgattttgtatagtatttactttattatacttttggctccctactgaattttttagcatataataaatctgattcacttggttctgttttttgttctataatattcccttgttcatcatactttttaaaagtcatctcacgtccggcaatacattcagactcatactttttagccctgttttcaaagaattcaacctggtagccttctgccgagtttttattcatatttcctatcctttttatattaccactcggataaaattccacatattttccttgtttaacaccattttctacgtagaaataactttctatattcccattttcataaatatcgtaagctaatccagtaaataatttttcttttccatcatcagtatactctactattcctaaatcataaggccctccgtattctaagtactcctcaaactctaggccgttctgtattatatattccttcgttaatatatcatttaacattttttgaaacctccgtgattatttcaaattcatctgtaagataagcacaatgaggacaccttagaaacatcattccagctggttttgttctattttgacccgtacgaattacattgataacaaaattatccaaaccagcacttggattagcctttaatgctttattcaaggcaattacttcagcgtgtgaacctgcaccttttgtaaatgtatatgaatcaataacttcttgtggcatagaatcatatcttgactttattaaaggatggaaatcgggcaatattccatcgtagtcatttatcgcataataaattttaccagttgttttatcatacactccagcaaaggctggaccaatttttttcttacttatccccgtatcctttaacttttgcaattccttaagtgtttcgccgcgtaagttaatcctataattcaattctttcgaagtaaattttccatatttattacgtaaataatctattcgactattacccgtacccttagctacactaccttccttactaactcctgaaccaccactacccttagcaagttgataagcgtcatccttagctgccgtacttacctttgaaaactttccagctacttctccaacagttgaagattctatataaggaagcctcattcctattccagtatccaccatcctaactgctactggaataggagtatttttcatagcatctagtgcattttttaaagtcttattttccttaagcgattgtaccacatttccacccaaatttggattaaaaccaggcattccttctttgaattttaataatttggctaaatcagctaattcactcgtccctttgaatgcttttactccttttcctactgctccaacaactgggattgcatctaatccgccaaaaatgatgtttcctacccgctcttcttggctcaatttcctatgtgttccccagtcttctccgtcgataccgctttttatttgtacacctccgtatactactgcggcagcggccccgagtggtggacaaaggattgttgtgatgatgattcctactcctattcctatgtctcgcaccatttctagttttttctgttcatcttctatcgatttgtattcaaatcctcgtgtggatgggactactttcttgtattcttcataatttaattttgcatctggattttgtttttttagttctttgtattctgccctaagtacgttatcaaatgcaggtgaatctctaaaaatatcttctactgttattttatctttcttcttctgtattgtttgtggtacacttccgtagcctgcatgcgcacctggtaatactgtcgttgttgtagagccaattcggttatttgtttcaaaactgagaatagatgtatctctcattttttgagcgaatttatccatttctactaaaaaaggtttatctatatgttcagatactaatcgccctgcttctccgcaatatttttgtaatgtcgaatagctatcaagtaattccccgattttttgcgattgatctttaggattaaaatgtatactaccatccgagtctaaatctcgtattcttccatcaattctttttaatgattcatttgcttcccgtaattttatgagtgcatcttttgtaattcgattcataccatcccccatgttttgccatggttcaggtctatatttcacatccatctcgttttcatccccccagccgtatggtgatttctacaacttacttaatatttcacgtaattgttcgtccttttcaagcatttctacacatacatttcctacaactgtcgctgacctagaatagtgttcagccaattctagtgttttgtgtaatatatcaggatatttttcaattactctcatcgcttcacctttttgataaaaattacagcttaataaactctcaatattcgttccaatgacgtctacatggattttatatatattttctaacttcattactatatcaagtagttcttgaaaattaactaatacttcttctccaccaccagaaccactatctcccattgatacttgcattattgaatacctcctaacgagaattgtctcgggtcaattaactttttatatggcatttttaacacgtcatacaatttcttattaaccgcatagaggctcacccagtcatatcgattacgatctacatctatttgaacgaaatcttctccttcagtaaaatataagaaacattcccattttcctcctctattacttcgaggcctcgtatacgtttctatcgctataacgtctttatttgataaatctttttcctcaaatgtttgttgttctgcctctgtcattctctttgagaaaaatgtatcttctatttccctcggttctctcaataagaaaggaatgcgtgttaataatgaaaaatatacgtccggttttggtatgtagtcgatctcgtattttttatttggttctatttctgttaatacagccactcggtctttatcctcttttaaaaagccaattaatacattattcattctcgtgtattcatgacaattttcatattcctttaatagttcaattatttgaaaagctgcaggggtaattccattttcacttgtaagtaggcctttttcttttaaactcgtagttgctttcgtgacacattctgcatcaagtaaaataattgcgtcacggtttggcaatccaaatatatcggtaaccccagctgcacctgcgagaacatataattcagcaggtgcaaaactcatttctttccccattcttttatccctcgtttctccatcacagttgttttatctcccttacttccgatttatctccgtacgtttgaatgcttttatctaactctttcaaagctttcgtatgtccttcaaatgcctctaccatttctgaattatattgaatgatcaaatcaagataacttaaaaatgcatctctcgtttttccattccatttcgcacctgtgacatatgcttttaagtctttcgcttggtttaaagaatccttcataccattttcaatgttttgtgcgtaagaaatggcacttgcagtgttacttcctataatttcaacctctttaccactcatgttggttccctccattctttgtatggttaatggataagtttttcaaattcctttttcttttcttcaaaagccttggtcgctgcagcgtatgctgacgctttctccgattctgctttcgctttatattccaaatactttgcataagctgtactttttgcagatccaacatcgcttaatgcacttttaaaataggatactaatgtatgtaattcttcatccttttcatgacgtttttgttcaaattcaactgccggaattttattagcttctaaaccattacttttactctcataatctctcttcgctgattcagcatcttgaatgaattgctttaactctctttctttatcttttaaataatcatgtaaatcatcataccgatctcgtttcctcgcactttctgtaaaaccagacgcatttaaaaaagcattgtacaattcatctaacatctttctccccctttagcacaataactatgtagttaaattcgtatatttaaacatgaatattcattacattaagaattaacaaataattatttttacatattgctattttatcaaagggattttaacatttccatattttatgaatggctttcgcatttttcttcaataaagtgaaactttaatcaatatgactatgtatttatgtgcagaaataataaaaaacactgccaagcgcagtgttttttattattaccttttatccaattcattcgtattaaatccttgcttgagagtaagaccagttctttcttatttcataaacaactatttctggataatcccaatgaagcgtacgagtaggctcccggactcgttttactattccttgggctgttttatttctatattcattccaatattttggctcagtcgctcttaaaagaacaatagaaaaaggatctgatatgaatatcagatccttaactttaatttcttaatacatacatctttttacacgataactggttcatacgtgctcaaattatcatactcagtttttacaatactaggcggaaggttaacacatcctcagattcaccttttcttgtagcagtgcataatgtttaataaaattaaagcatatttttacttaccagacttaattttttcgttatattcttctaaagttaaccctttttcttttagataaacagcaacttctttccctacataacgatagtgccatggctcatacttaatgccagtaatattctctttatcttttggatagcggagagtaaatccatattctgcagcgttcttatctaaccatttgaatgcatcggtagtttcaaattttgcatttaaatcttctacagtattttgccattcaactgaaataatgtctaacgctaatccagtatgatgttcacttgcaccaggatactgaagatattccaatgccttagcactagcctctttatccgacaagccttgagatttatagcttttaactgaagcatcataataagtttgttgtaattttatagctcgataacctgatcttaaataaagattgattccctctttttttgcagctgctaccatatcctgataggaagttgcaattctactatctattttcatatttggcttcgcattttgagtgatacttgttaattcaattcctagttcctttgataacatatgctctctatttacaaggataattctccaatcattaacatcagagataggtaaaacatcttttttcttcgcatgtatttcatttttatttttatcgttattattagtagttgcctgagatgtttgctttccactacaagcagcaagactccaccccattgctaataccaatgctaaaattataaattttttaattgtatctcattccctttttgtttattagtctttataccaatttcccaacacgtctctaggaatctccttgaaatccttcaaagaaacgggaccgacaaattttttaattccatgttttttagaattttcatccgaataatcttttaaaaattgaattttaaattgtttcttaccatcggcatagtcggttactgtcggtacgattgccgcttgtcgtataccaaaagttttatcttcatacttaacaaattgtacataagataatcctccaactaatgtttctaatttttcttgcgcagaaataagatttccaagagaataatagattagcgtttcatgtccatctttattttgtttccactcaattggttgaattacatgtggatgatttccaattactacatctacacctaaatctgttaaatattgagcaacttctttttgttgctttgaaggtgttgaggtatattctactccccaatgcaccataacaatcaccatatcagagctactctttgccttttccacatcattttgtatcgcttttttatcaattaaatttaaagcccaagacttatcagctggaattttaattccattcgtaccatatgtataatttagtaacgcaaaacgaataccattttttgtaatcgtttttatttcattacgctcgtttttactctcattaatacctaccgggataacatccggatatttcttccagtattctcttgtattcgcaacacctttaatacccatatccatagcgtgatttgtcgcttgcgtcactatattgaatccagtgtccactaaagattggcctacttcttcaggtgtattgaaagtcggatatccctgtacttttaaattatttccggcaatcggagtctcctggttcactatagcaagatcacttgatttaacagcttttttgatattttcataaatataattataatcatatgaaccgtctttttgtttgccatctttaattactgcgtcatgatataaattatcacccgtagctattaaattcacaaccgattgtacttttttatcttccgtaaaattaggagactgttggataggacttttctctacccaatttggtgcttttaatgatgtatctatattggattcagccggtggtaatgaagctttagacgtcttaacatctgtattaccacaagcggttaaaagcactaaaaaaataagacatactaaaaaaaactttttacttctctgtaaagtatctaacatgtgatcctcttttctgttttattccttataaccagttctaacaaatcattctttaaaacaacgtattttggttttacccttaattatggaaggacactctgttacacctgcttcggaatatactaataattgttttccgctttctagcaatctatcgattccatcagaagtgataggttactagaaaaagatgatccatcaggatgtcgactagtttgatatacctattccaattgcaataactcgtttaatatttaaacaagataggagaatcgttcatatagcctcttctctcgctttatgtttaaagtgcctccaaaaaagggatcgttgctgtacccctttacatagtacgaaatttttgtaactaatttctttcattcaagcgacaaacattataccgataacaataagtaagacccaagaacttattttaccaatatacgaaaaaagtagcaatcttttgtcccatataaagaagcccattaggagaaatgaacgagagattcattctattcaattcctgcattgattaataaaaaaacaagccacccaactattggatggctctatactataaagagaatttgttattggattacttcaatttcccttcaaaaacaatcttcctaccgcacggttcaactactgttttgccgtctttttttacttcatgaaagattggctcttccatacgacgagacggagcgtagccttcttgttccatacgtgctaagcagtctgtaattgtttcattttcaagtacttcaaatttctttttattaggttgttttgtcatgccctaacctactttctatttttcttgatgcaaattgatttttcatgtagaccatatataacattgcgagaattcccattataatcataaccgcaataaaaaagcttgtatactgtattttttctataaatacgccgcctaatacaggtcccataatacttcctaaactaaaagcgattccggataatatattacctgccggtagtaaatgtctcggtaataaatcagtcataaatccaagccctaaagagaagcacgatccaataaccatacccgctaaaagcatgcaggcaaagacgatccagtaatattgatcaaatacggcggcaagtagaaaaatgcccgtacttatgctaaacgtccacgttaatatacggtcccttccgtatttatcactcaatataccgagcggaatttgtgtaataatacccccaactgcaaatgctggtaataagaaggatacatctgaaacagaccaccctttacgaagtgcgtatactggtaagttactgtttaacattgcttcaagtacgccatatgcaagtggtcctagcagtgcaatccatcctaatccaacaacttgtttataacgagaaaatgatgattcactcttcacttctctttcatcttgcgctgggaatgcattttttgttggaagtagtaaaagccaacctattaaacaaagtaaagtagatataataaatggcgttgcaagaccgtactgcacagtgcttgctaaatacgggccaacggcaaaaccaattccgaagaatacaccgtatatcgatacttgtctccctattttacttgggtctgatgttgtcgtgatccacgtttgtgttccgacatgaagcatatgatctccgactccaactagaaatctaaggataaaccatacccaaaacgaaaatgtttgtgtaaaaaagaataatgaaataataacgagaaacccacctataacaataatcggcttcattccaaacctttgcatcggtttttcaagaaacggcgaaatgactaatatcccaatgtacaatgccgtcgcatgaataccattaatacttgaactaaccccttcttgttcaaaaatcattgcaatggccggtaagagcattccttgtgataaacccgagattgctacaatcccaaccataatccaaaaagtaaaacgcattgacatccctttccctctccttctcacgcttccacttttcattataaactgtttctgcaaatgcgtgtacgaatattcgcaataaaaaacaagctaaaagaatgaatcttttagcttgttaccttatccttcccaaacttgtgctttcacattgttatgaaattgcttaaagtatggatgtttataaaaagcagtttcatataagtattgctgtgcgttagcgattggtggctgcggatattgcatttgtaaaggaactacagctggcgaaacttgcatatacagcggttttatcatcatttttgtatatgcgtaatgattatatggcgaataagcgatgaaaaatggttgatgcattgataatctcccctttaacatacaaatgttatagtatatgcaatactgttcatttcggggattatttctgttctaaccaattctctacatgttttataaatacatctaaacaatcaataaacggcgagtgtccgcaatcttctaataccttcaactctgcattttgcaaatgtttcgctaattcctcaccgactacttgcggaacgacataatctctatcgccttgtatgacgagtgttggcgctttaatacgatgaatttgcttacttccctctacaaccccattatattcatctgaaatattaaatgtaatgagcgcataattcacatctacgaaattacgttgcgttaacatatcatctaaatacttttcataacggtccggttcaggttggttatgcgtatatattaatagattccatactgtacggtaatatagtttgttcatattttttatcgcgtctaatactggagcgatttgtactggatcttgtgcaatttcttctttcgtctttactaaacttgatacaatcggctgcccattcgtatcttttttaaagattgggtaacctttcattcctactgattctactaaaattaacttttctacaaaagttgggtggttcgctgtaaattgcatcgcaacgccaccgcccattgaccagcccattaatgagaatttctctagctttaactcgtcgataaataattttacatcttctgcaaagtcttgtaatgaatctatcgattgattatacgttgattgtccaaaccctcttaaatcaagagcgtaaatatggtattgatcttgcaacttttcaataactaaatcccaatgttgtgacgatgtcatgttcccgtgaatgagtacaagaatatctgtatttcgccttccaacttcctgatatgcaatcgtttctccgttcgatagtgaaacaaactccattgttgcaggcttaatcatcacaagttcccccattctatttaatagaaagaaaattctttacttaattaaagaatagcacgtagaatgtacgttcgcaacataaaacctataagaattttttacataaatcaacatgtctattactagacaattattataaaaaagtatatagttagctaggtaactaatttgaaaggatcaaaatacatggacgaaaaacaacatttttttcacatcgtcagccagacttctcgaaagtttacgaagaaatttaatgaacgtgtatctccaacagggttatttagtgcgcaatgggctgttattttccgcattaatcaaactggttcttgtacgcaaacagaattgtgccagtatttaaatgttgaatcaccaacgatgactcgtacgttaacacgtatggaaacgatgggatggattattcgtacagaaggtaaagatcgccgtgagaagctcatttctttatccgaaacagcgataaagatgattccaatatggcaagaagaagttgatactttcgaagaaaaaacgctagaaggtattaacgaagatgatttacatcaagcatttcaagtgttacaacaaattattaaaaatttagattaaattggagggatgacgatgcaaagtgagaaactttggacgaaggatttcctcggaacttgttttagtagtctatttctcttcttaacattttacatgcttatgactactctacctgtctatgtaatagacggcctaaaaggaaaacctgaggaaattggtttagttgcaactgtgtttcttatttcttctgttttatgtagaccattcacaggaaaatggctcgatgatttaggaagaaagaaaatattatttatttcactttcattatttttagccgctactgttatgtatttcggtgcgcaaagtttattcttattacttgcccttcgcttcttacacggtattgggttcgggatggcaacgacagctactggtacgatcgtaactgatgttgcgccagctcatcgacgaggcgaagcacttgcatatttcggcgtatttatgagtctgccgatggtaattggtccttttttaggtttaacaattatttctcatttttcgtttactgtgttatttatcgtttgttccgtattttcattacttgcatttttattaggactacttgtagatattccacacgaagcacctgttagcaaacaaaaacgtgaaaaaatgaaatggaaagacttaatcgaaccatcttctattccaattgcacttacaggatttgttttagccttttcttatagtggtattttatcctttattcctatttatgcgaaagaactcggtttaagtgaaattgcaagttacttctttattttatacgcacttgttgttgtcatttctcgtccatttacaggaaagatttttgatcgcttcggtgaaaatgtactcgtttaccctgctatcattattttcacaatcggaatgttcatattaagccaagcacaaacttcattttggttccttggcgcaggtatgctaatcggtttaggttacggaacattaattccgagtttccaaacgattgcgatttctgccgctccaaaccatagacgtggttctgcgacagctacgtatttctcattctttgatagtggtattggctttggttctttcattttaggtattgtcgcagcgaaatccagttatcataatatgtattttatcgcagctattatcgttgcgttcactttacttttatattatggattacacggacgaaaacaaaaattcaagaaacaacctacagacggaaaaatttccgcttaacgttaataaggaaagtaaacttccccgtttactttccttattttgtatttctttcaagacgagcgtatacttatagtagaaataaaaaggagggccatatatgaaactaaaaaaatctcccctactcttacttatactaacattcatatttgtaattacagggcttgggtttacttacttcaaacaaaataaaacgaccccatcaaaacataatgtgacaaaagaaaactggttaaatgacccttacttacgttggtcatatacccatatgaaagaattcactttagttaataacgtaaaaaacaatcctgaccaaattgctcacttcccttccgcattgcaaaacttagacgattttgctgtggagcgtagattcggaaatacaactcctctaaaaaaacttttagacgataacaaaacagatgcttttgtcgttgtacataatggacaacttgtttatgaacgatatttcaatgggtataaacagaatgaacctcatggtatggcatcattagcaaaagtctttaccggggcgattatacaatctctcgctgaagaaaaacgtattgacttagaaaaaacagctgacacttacataaaagaattaaaaaacacaccgttcggtaatgccacacttcagcaattaatggacatgcaagtgtcagctgaatatcctactcatggatatgagcagcctgggctagaaaatcaagatgcacaattatatttagctagcaatattttaccccgcggcaaaaattacgacggtccgatgaaaatttatgatatgttacgagaagccgaagaaactgcaccgcctggttcttccttttcttacaataacggatcaacagaaacgctcgcttggattattagaactattactggtaaatcactagctgaaaatgtaagtgaacgaatttggtctcaaattggtatggaagaaaacgcgtattacgttacagatgaaacaaaagtagaacaagctagtgctggattaaatgcaactgctagagatatggcgagattcgggcaattactattaaacaacggggaatataacggaaaacaaattctcccttcttctattacagaaagtgtaaaaaatgtacaagaaggtgaacttgaaattagtagtggcgcttctatttcttatcataatcaatggtggattccccacaatgaacaaggtgctttcgaagtgttaggtagttacggacaaacactttacatcgatccgaaagcaaatatggtaatcgcccacttctcttctaacgcaacgccaagtaatgaaatacattcggtttattcaaatatgtatattgatattgcacattatttagaaaagcttccacagtagtggaagctttttcttgttgggacattttatttatactcctacatattagaagatactgaaagaataactgcttaaaacacgcctatcaaaatttatataagcagtttacatgtttaattaagtgtttaactaatacatccacaccttttggagaattcgttaaaacacttcccttacaaagattgtctgttcatattggtcgaaaatttcttctatagatgaaaataaagtttcttccgggatgatgaactttattttttgaccattttttaacataaaggaaattgttccattatcattaaaacctgtatgaaacgttcctcgtttatttaatactacctcttcaattgtatttatttcaattgaaaagttattctttaattgcaagagttcatgtacatcgccagtatgtatttttgtatctatttcagtttctaagtttaattgttttttctcaatttttttgaaccagaacaaaaacaatagctctgaaataccaggtaattgttttttataagcatatcgactatgaaactgtccgccaatctttataaaatatatacagtcacctgtaataaaaactttataatacatatctgccgtaaacattttaggctttaaaagataaaaacttttgatcataattcccccatcaattttaaatgtatttgtataaacatttttagctagatttgtgctaaaacatatttctcatgtaatacaacactattgtattgaatctcctctccctttgcaacagttgctttgaagccagctagtaacctttctgtatactatccctataagtgctaccccatttccaaccgttttcttctagtatattaaaagcagaatctgatacaaggctctatatcaacctatcaataaattatcaccctataaatatctgaattttctttatattagaggttatctcctaaacaacctcgaataattgtactacatatacataaggagggtgatctattttgtttcgttcctttacaaatggttgcgtcgccttagtgcaacgcttcttgccagaaccgtttattttatcatgtttactaactgtttttgttatcttctttggtatgtttgcgactcaccaaacccctgtagaaatgattaatcactggggtaatggaatttggggactcctcgccttttctatgcaaatggcacttgtactcgtgactggatctgctttagcaaatgctcctcttattaaaaagggattaacgaaagctgccagactaccaaaaacgaatggacaaggcattattgccatttcaattgtaagtttacttggtgcatacataaactggggctttggaattgttgtatctgttttatacgcaaaagaagtggcaaggcagctggacggattagattatagactagcaatcgcctcttcttactctgggtttctcatttggcatgccggtctttctgcctctatccctcttacgttagcaacaggcggtgaaacgttaattaaaacgactgctggaagtattaaagaggcgattccaataacagaaacgttattctcaccatacgctctcgttccagttattatttttctcgttacgatgcctctcattaataaagcgatgcatccagatgaaaaacatacgattacagtagatcctagcgtgttccatgaagaagctgctgctcaagaagtagaaaaaaatacgttcgctgaaaagatggaaaatagcattattattacactttgcgttggattgttaggtctcatttatattttcaattacttttatacgaaaggttttaaccttactctcgatatcgtgatttttatgttattaattgcaggtcttattttccaccgtactccgattcagtatattcgcgctttttcagactctacgaaaagtgcttctggcattttacttcaatttccgttttacgcaggaattatgggcatgatgattggagcaaatagtgaaggactttcacttggaggagctatttctaatttctttattagcatttcaaatgaaacgacttttccgctctttacatttttaagtgctggcattgttaacattttcgttccatctggcggcggtcaatgggctgtgcaagcaccaattatgattccagctggcgctgaacttggtgtacctgctgcaaaaacagcaatggcaattgcatggggcgatgcttggacgaatttaattcaacctttctgggcattaccagcattagcgatagctggtttaggtgctcgtgacattatgggattttgtgttgtgaacttactatatgcgggttttatcattagtctatgcttcttatttatttaaacgaaaagctagttttatactagcttttttacataataaatcacttatttcccatgcaatttataatcttctcccactctatctccgtaagatgtaatgactcaaatgcaaaaaaatcttcgcaaatttttccgattaagtgtggatgttcactcaaaaaattccactgtaacgctttaggaagaaaatatgtttcatattctttacttccccgtactatctcatctacttctctttcacaaattcctcttattaaataatcatttcttaactctatttgaatttgctgaaatgtttcgctacattttttcaattgaagtaaacgcgtaacatacttccgaaaaagttcgccatcatactgaacacagtttataatacagtcaacttcattcataatgtacgagccttttcttctatttgtaataaccatttttcacgctttgatactttactctttttcacagattgaaacactgaccgttttatattgcgaatgccacaaaaacgtaaaacacctctcttcatcataatccaatctgctgatcgatataacaatgcgacgtaccataggggcgagtctaacttattaataacccatgcttttttcccttgcaataatcctttcggcagagccccttcatatttataagcaaatccagctacgaaaatacgatcgataaatccttttaaaattgctggcatcccccaccaccatattggatagatgaataaaagtgtatctacttcttctactaacgttctgtaccgagctgtttcttcttcatttactaaatcacgtcttttcttctcttcattaaatacgaggactagatcaaattgttctttgtataaatcaagcagcgtaactgaatgatttgtttccggtagtcctttttgcacatgatttaaaatcgccgcgttaaaacttgaaggattaggatgagcgtatacaattagtacgttcactacataacaactccctctatacgttaaagtttccccttctttaacatcttctctacaatctgtacgtttttcgaactttgcaataatcgattcaataatataagtaattcttctttttctaaatctctcagtttctctttaactgcactctcaccagcaccttgaatatcataaacaactgccgccatatgcttacaaagattctcatatggacatttgcagctactttctgaaaaatcttcgagatcgataactacttcataatttcctgcatttccagtaacgaaagcaaacacttttttatcatgtatttcaacatcttctacatgtccatcttcataatattcatatcccttatctacaatgtactttgggatccatttcgttatatcttttaataagtaagcgtacataattgtaccccttcctttaattcccttttgacttcaaaaatcctgtatgttattctaataactgtcaaatagcaagtctatatgacaaaacgactgacacctattcggcgaaggtgtctcttttcatttgcagccgatatgaattgcctctttcaggcacattcaatttttgacactacacactcaacaccattccctgtatcaggctgctttagcagtcttttactctacatactccgttattttaagaaaaaaagagagcttagctcccttttctcgccttatacaatacccctttttcagcatagagatattcatcagctaatgtaattttcccatccagttttagttcgtctaataatcttgataaataaaattgatgcaacatctttttcgtgaattttccttcatgatgcgaaacgatatgttcttgaatatctaacaatgatatcggcttatcttgctctatcatatattcataaactgtactacgcagttttacgtatttttcgagtgtcacagtaatgcgcaacccctttcttcttaatataaattttcgtaatcggtttttttgcaataaaaaaacctctccgataagaagaagttacgtatatatcttcgtcttatctcccagaacaaatatgttctgctggaattagcacctgcatcgcggttgctgggtttcatcgggccagtccctccacctctctggataagaaaatattcacttaattcttactatacgtaattccactttaattgtcaaataaatataacaaattatattttcttccttactgttcatactacccatatacgaacacgcaaggaggattatgaaatgcatcaaaatgctcgcggatatgtacaagattcttttcaatcattacaagaagctaaaaattgtttagaagaagcgctcgaaacagttgaaaaagattttaatcgcgctcgtattgaacaatcactttatgctgttgaacaagctattcaacgttgcgagtacaccgttcacattttagaaaaagattaaaaacttcccatcaattgatgggaagttttttcaaatggcatacttcataattattgccgttataattaaaaaatatacagaattagcaatttctaaaattcctacttttataatagaaatttttttgccatacaacacaattgctcgaatggcacttggtataaaaataagagaacaccagggattaatcacaaatatgattatcgttaatacgatatgatatccccaagatataagacgatacttcgggttatttttttcacgaatcatcgttttcacatagaacgtactacctaaaaagtataaaaatgaaataagtgcaatgaatatagctgtatgaccgatttgcttcattgaaaagtaataactaattaatccaccgatacaaaacacaataatcgcacaaatatcatttaatagtgctctttcatttttttgacgagcgtaatacatattcactataaataatggaatcattactattacgaataaaagaattcgccactcatataataaagaaatcatcccaaataggaacgcaatactgaaataaacaatggcagcttgtaaaaactctttttttcgtctttgctttatgtacgtaagaaatggatacgtggctaaatagataaaaaaccacgctaaaaacaatggaatatgataaatagtaggtttcccaagtatgacacttaataaaaaaggaataacaagcatagcccatgcaccatgttgcttcggaataactaacttcattaactatacacctcccttttgaaaaaagttctcacctaccattatacaaataattttatataataacggatgtatattaaatcgattttttgacaaaaaaatgctccttacagtatgtaagaagcatgaaagaggcaaacgaatatgtaagtcgcgaccctaccttatatgagtatgcttttctatgtcacgttatgctcatctaatataccgtatttctttttaaatcttgtaagaatcgtaatccatgaagtactaaatagtaataagaaaataacattcgaaatcgcatggctcaaatcaaagtaaaaacttgcgatataatacgaaatgacagtttcccatgttgcttctcgtataaaaccgagaagaccccagaaattcataatccagccaaataaaaagccaacaattactccgtaaagaagtcttccccatagctttttcataaaaaatgtattacgaagtaaacctgctataaaaccaatcatgccccatgaaaacatttgccacggtgtccatggaccttgtcctaaaaaaatattagatacgattgctgctgtagcaccaatcataaaaccagtttcactaccaaatacaattgcagaaacgataatgacaaaagaagttggttgtacacttggtaaaatagaaaatggcacccggcttactgctgcaattgccgctaatacagcaacgagaacaatttcacgtgaaacaaacgcctttctttcaaaacggatatagaaaggtaacataataaccgctaatataaacaaactacttaacatgtaataaccgtccatgacaagtgtcgtaaggagtaatgtgccgattattactgcaaagatacatattatgaatgcaacatatcttttggacaagcttcgtacacatcctcccacgttaatgcatatggcaattcttttcgaatgaatcggttaatagatgttgtataaaagaagttgccgctaaaaaattctttcggtgcatcattcataatgactgttccatcaaataacatcatacattgatcaacgtatttcgctgcaaactcaatatcatgcgttgccattacaattgttgtaccttctttttgtagcttcctaaatagctctcctactctttctttcttccatggatctaatccctttgtcggttcatcaagtaataataaagtcggctttgataataacgttgtacataatgcaagaagttgttgctctcccccgctacaatcgtgcggatggcgttctttaagcgagtacaaccaaaactgttttagcgtatcttctgctatttcttttccttgttctccatataattcacgcgcacgttcataaacctcgtcccatactgtatcaaatgtaaaatggtaatacggatgctgcgatacatacccaatacttttaaaacgttctttcgaatcaattttatgtattacttttccgttccactttactttccctcttctcgctttttgtaatcctgctaaaatcgttaacagtgtagacttacctgtaccattcttcccaacgagtgctacccattttcctttttcaatcgaaactgataaatcacgtaaaataagcggactatttttttcatattggaacgaaatatgctctgcgcttaaaattacctcttgcttttcactttgtgctattggctcatttacatatgatatcgctgcaaaatcattcattttcatttgcgcctctcgcactgtaaacggaatatctctcacattccactctaaaaatagccttggaatttgcggaataaatggacggaatgtttctactccccacatatccgtaataacaattttaggactaccatcatacataatacggccattatccatacaaacaacgcgtgttgcaagcgggataacttcatctaaacgatgttcacttaaaataatcgtaattccaagttcttcattaatccgttttaataatcctaaaaactcttttgcagcgattggatctaactgcgctgtcggttcatctaataatagcaatttcggctgcataactaataccgcagctaaattaacaagttgcttttgcccaccagataacgtgtgaacagattgatgcaataaatcttgaaatcctaaaaagctaataagctctgctattcttttttgaataatatgtgatgataatccgatattttctaaagaaaatgctaattcttgaattactgtatccataacgatctgattttctgggttttgaaataccatcccaatttcttgggcagataacaaatcagctacttcctctattaaaacaccctcataaaatatctctccagaacgcgtaccaattggaagtaactcctttttaaaatgttttaataaagtcgtcttcccagatcccgatcctccagcaagtgcaataaactcacctttttgaacagaaagagaaatatgctgtaacgctttttcattttcatcagcatatacaaatgataaattgtttatttctgcatgcgccaccatatccattctctcccttccattatgattggtaaactaataaacatcgtaaatacgacaaacatcatcccatcgtattgctgaaatagaatcgattcgactttcggataaataatcaattcccccccgccataattactacatataatagcagctataaataaaatgattaaataactgagcgtataccaatcgcgcctttccattctatagcgaatatacgtcgtacgcttcgttacaccaaatccacgagcttgcatagaatctgccgtttgcagtgcatcttctaatgaacaaattaataatacttgcagcaattgcataccatttttgacgcgttcaattatcgaacctgaatctacctgcacacctttcgtcttttgaacgagtgtgattttctttaatcgccttataaacaaaggaacaaatctcactgtaatcatcgttaacaatgcaactttcggtgaaattcttgaaaacaaatataaaaatttatgactggaaataatatcattgtatgacgcaaacgtaaacataactgcaactagtaataaccccattactatgccaaacataatcgcctcaagcttaatacggctatcacctaaccaaaataacgtagttcgacctctatgcgttaataacgaattaaataaaattaccataaagaagaaaacaattgtgctcggtagcatctttcttatcttttcgctatttccttgcatcacatttaacataataattaatactattgctccaattaaaaaaagaggatgaagacacatcatacatagtatcatcaccccgatataatagaaaaaattcacaaaaggatgtaaagaagaaaaacttattttcatagccctttaccgaatgcctttcttattgtaatacgtatacccactcaattgtatctcctggttttaccgtagctacaccagcactatggtttggaaaagcaccgttcacacgatatttccatccactagtatccgcaatatctttttcatataaatcattaataccttttacataaatactatctctagatccgcttgcatcaacatctaatcctgtacgttgcaatactttatacacagtatcgccatcttgtacatccatctttttcgcacccattatatatccgttatttccttttactgagattgttacttgttttgcttgcggtttcggtactggtactggatctggttttggtggttcaggttttggtactgccggagtcggtatcgttttctccgctttattcggatcttctttttgctcctgcttcggtgtttctttcggctgattcacaacctttgcttcttcttttacttctggtgctttcggttgttgtttctcttcttgtacttgttgctgctctggttgcttatttacagcaggttgctctttcggttgttcctgttgtttctcttctttctttacctctggttgtgcctgcggcttttcctctttcggcttctcttctactttttgttcttgtttctctttctgttcttcttgctgcttttgctctgattcagcttgcttttcttttgttttttcttccggcttcgcttcatctttttgttctttttgtttcgctacctcttcttgcttcggttctaccttcttctcaggctttacagctgcctcttcacatccggcaagtagcccgagcgaaagcagtaaagaaataaaccatttcaccttactcatcctatctctcacctttcatacgaaaattaggagcaaataattgctcctaattttttgttaagctgctttacgtctccataatacatatgcagaagcaatacataatacacccatacctacttctgttgctggactatgagaagatgctcctgtttttggtagactgttaccgtttccgatttttttattcttaaccggttcgttatctacaactacttttagattttcatcttttgtttcttgttgtacttgtttttgttctttcggttcttcagtaacttctttttctactacattattttctggttcaacgaccttttctggctcttcaatcggttttggcttaattacatcaccagcgtctacattagaccaatcataaatagattttcccatttccttaaattgaagtaatgctaaaagagcctgttctgtagccattccgttaccattttgatcacttggtaaccatttaaattcaccatttgaaagttgatatgataataggttttgcattgccttatgaagacgattttgatctacatctttaacaagcgataatccaataattgcttgcgcagtactatttgaattttcttgtccatcagctgaaaaaccgccattttgcagttgttcgttatataaatacgcaacagctttttgtatagctggtttcacatctgatcgctcttgataaggagctaatgctgataaaaccatacctgttacatcaacgctactagcactatctttactacctgaactattataagtccatccaccgtctgtatgctgattatttaacagtgcttccactagagcaactctgttccattttgattcaactggaatctcatacttcttcgtatcaaatgcaagtaaagcaaatgcataacctgtaacagaattcactttatctgactcatacaatttttgaactaaattatgtccacctacatttttagggtctgcactcattgcattcatcataataattgttctagctaaatctgtcgctgaaaaacggttaatacgcttttctactttttcagttactgacttaacataatttaattttgcctcaattggcacattctttccagaacgagaaagcgctacagctacccagtcactttcaattccatcttgtaacatcttatctgatgttttagaaatggcttcgtttaattgtgcacttggaacttgaatgttctcttgctgtggttgttctggttttttaccatcttggtcaccttgatttttcccatctagcgttttatcgtcttggtcaccttggtttttcccatctagcgttttatcgtcttggtcaccttggtttttcccatctagcgttttaccatcttgatcaccttggtttttctcatctggcgttttaccgtcttggtcaccttggtttttctcatctggcgttttaccgtcttgaccttttgattttggttcttctgttttgccaccgttaggttcttctgttttacacgtcccgaacttatctaacgtttctttcaatgtttcctggcttatattgctccagtctgaaacaaagcgaaagacaacaacatctccagattttaatttataactatctgctccgacttctgcagacttatcatttacatcatacagccaagcacttgtagccccggccattaaaccatcgatgccttttacatatgttccaaacgacatcgtttcagattctaccttgtcccccatgaccttttgcagcaaacttaaagctgtttccccatctttaatttgctcttctttcggacataacataatgcctttttgtgattccccaataattgcaagttttgctgtattttcttcagcaaacgtaatatgtactgtattcgcaaaagaaacaaatacaagtgtcactgccattaacgacgtaagcagccactttttcaacattgccatcccaaaatttcctcccttactaccatttacacaaaaaaaggcccttcaagggcgtgcgattgacactctctttttgtaagtgtcgaacaaaaatgtacaacacctcctacccgcattattcgcggctatatttgtataggaaaaataattttgtttatgaacgtatcattgtgataacattcacttttcttggcacaacttacttccatttaagttatcgtaaaacgataaacctatacattctgtaaattttaaatttctgtattattttactattgacaaagaattttgtccatgctttatcggatttattttctaagaataataacttattaactcttaactatgtaaactcttttcactaataatgacgccatcttcatccgcatagacatattcatttggattccaatccacttgtccaaagtgcaatgaaatatttcgttctccttttccttctttcacacttctatttggcatcgttcctaacgctaaaataccaatattaatattctttagttcactagaatcacgaacatacccattcacaataattcctgctagctttctttcttccgcaatagctgccaaattatcaccaagtaacgcacaattagtagacgctccgccatcaacaactaatactgttccttctggtaatgtttgcaatccttccttcactagtacattatcatctttcacttttacagttgcaattttcccgtggaattgttctttcttcccaaaagaccgaaaagactggcgacatatttgtaattccttttcaaactcatcacatagatctgtagttttccacatcttgttccctcttttcctttttctttctacataacatattcttggcttattatcgtttccctgtctaatattgcaataatttgtatgtacgggaaaaggatacaaaaactattgccttaagaagctacctttattataatctatttcacggattgaattcagaatattaaaattaataaagtgaagaaggaggaattttatgcaaatacaaactgaggcaaaaaaacaacctagtaaacaaaagtttaaaatgcctgatgcgtacgtactactattttttattgccttactttgcgctattgctacgtatttcgttcctgctggagaatttaaaagagttacaaacgggaccgttacaacgacaataccaggtagctatcattctgttccgcaatcacctgtaggatttgtttctttttttaccgctattgaaaaaggaatgacacttgctgctccgatcatctttttaattttatttacaggcggtgccattgccattcttgaaaaaacaggtgctcttgacggtttaatctatcatgttataaacaaatttcgtaatcagcaattacttttcatttgtatcgttgccgcacttttttctattctcggaacgactggcattatcgttaattcagttatcggttttatccccatcggtatcatcgttgcacgcacattaaaatgggacgctatcgtcggtgtagcaattatttatttaggcacttatgctggttttaacgctactattttatccccctcacctttaggcatttcacaaaagatcgcagaacttccgatgttttcgggaattggtttacgcacagctatctatatatcttttttacttgccactatcctttatattaattggtatgtaaagcgcttgaaaaaattgaataaaggaagcattcttggcgacaactggtttccaagtaacgctctttcaagcgaaaaggaagcagagaaaaaagaagttccttggacgatacgtcataaattaattttactcgtttcagctttatcattaattgcatttttaataggcgcttttcgtctacattggacggacgcagaaatgaccgctacttttattttcatagcaattacagccggaataataggtggcatgaaagcaaacgatatcgcttctacttttctaaatggctgccaaaaccttatctatggtgctttaattgtcggaatggctcgctgtatttcagtcattttagaacaaggcaaattacttgatactatcgttaaccagctcgcacagtctcttgaaggacaaagccctgtatttggtgttatcggtatgtacgtaagtagtgccgcattacatttccttatttcatccggaacaggagaatcggttatttttattccgatattagctccattagctgatttcatgcacattacacgccaagttacagtacaggctgttatgctcggcgagggtgtagtaaactgccttaatccaacttccggtgttttaatgggcgttctcgcagcgagcggcatttcttatggaaaatggattcgtttcatggctccacttgcactcatttggtttatcattggacttgtttttcttattgttggggtgaatattgagtggggaccttactaaatacttaactagataaataagtactatcgttccatataaatatctattctatttccctcactagtcctataaaaatcatttattctagtaaaaatataagaagggattgatcataatgatcaatcccttttatcaaaatataatacctttaaagatcttagttccagattttatttacccattcaggatgatcaataaaaggattgcggttatgttgatattttgtaaaaatcacttcattacgctttcgctctaaatcatcgaccgggtcttgttcattccattttaataaaacagatacagtctaagacagaaataataaaaatcaagatgatagctcgacttttcccttttccataactgtctttatttttgtgtaaaacctttttttctctgaataatacgtacaaaaatagattggataccatgtaggcaccaatctattttaattaaagaaactgtgtcaattctgagttcacaatacgttgtgcagtaatgataacactgtcagctgttagtccataaacactatatagtccaccaggttgattaggaacaatttgaacttcatattcaaatgcttgtccaaaagcaggatgaactaaacttagagttacaaaagtagaagcattagaattcacattgaagtttacctgttcaattaatactaatgaaccgtcaagtctaaaaactctagctactccagtaagtgggcccgcagtacggttaaggattttcaccctaactctatttgcattagcaggttgatttcctacgttttcaattggtcctgtagtaagagccatataacatcacctccattatattattatgatattcaacgataaacattaatgttatagtctaattacccaatctacttaaaataaaaagaagctccaaattctattatatttaggtcatagatattaaacttaataaaatcaaaggcaggagcatatttgatatgttcctgcctttttattgtgggataccgataaatagccctctagctaagattttaaagtgctacaaaatcaaaaattttatctcaccacagttttctacgagaatccagtgaacagcttatttacataatttttgttctcggaagttgattttgtagcgccctttctcgtaattcactatgttttccaaagaaaatagtgaaaaacagggcgatgaatacatttacaaaatgacaaaactgtaagaatacacgaatgtttgtaagaaagttcgatgttttctttttcctttttttattatagtgaaaaagaagaacaaaatattctcttatgtaggaaaggaagataataatgattgatctattaaataaatggatgttagaaagtacagccaattttaatatcgttgtaggacttacagcacttctatttttgggttcagtaattgcacttattattatttacaaaaaaattggtaaatcggttgaaagaacaaatactatttatttaaaaattacttctcgtatgtttactactcaaattctaatgaatgctatatttatttctttagttggtaaagatattgagaatttccgtcaaatctttatattatttgaagcttttgtattctttattggagctatttattcgtttaaattatatagacaggagtacaaatagttgatccccatctaatttctttgcttccgctgaattttgaggtgagggtcttacttcccggcgaatagcgggataaaactagaacttcttttcctatgtatcattatttcgttacttcaccaaactgcgctctcgtcactttcgccaagtcctctactttaagctcaatttgtataccaattttcccgccactcactatcatcgtttcaagtgattgggcactttcatcaatacatgtagaaaatagctttttcattccaactggtgaacaaccgccgcgaatgtatcctgacactttcgtaatatctttaacaggaatcatttcaattttcttttcacttactgcttttgcggcagcttttaaatttagttcctcatctaccggaatgataaacacatgataatttttactattcccttgagcaattaacgttttatatacttctctcacttctcgtccaattttctcagctactgatacgccatcaatttttccatcgtctggatcatatgacatcatcgaatattcaattttttctttatctaatattcgcatcgcatttgttttatcttttttcataacgttctccttaaaaggttatttcatattattaagttttattatacacccttttccatttctcctacataacttcacgtatatttcaaaactaaaaatattgataattcaaaaatcatctgatataatttggaaaaacttatgttaaggagagatttgtcatgcgaaatgttaatacttctttccaacttcatcatcatacgtaacgccgtgtatccgaagaaaaatttttcttcgtgggtacagggcttttcctgttgacccacgaagcgttcataaagctatgtgggtatttttatacctgcatagctttttttaatttaaaaaaggagtgattatgatggaaatgagaaatgtaaaaggaacgaaagactatttaccagaggagcaagtgctgcgaaataaaattaaaagagcttgtgaagatacgtttggacgatacggatgcaaacctttagaaacgccgacgttaaatatgtatgagcttatgtcttacaagtacggcggtggtgatgaaatattaaaagaaatatatacacttcaagatcaaggaaaacgtgatattgccttacgatacgatttaactattccattcgcaaaagttgtggcaatgaacccgaacctccgcctcccttttaaacgttatgaaattgggaaagtatttcgagatgggccaattaaacaaggaagatttcgtgaatttatacaatgcgacgttgatattgtcggtgtagaatcagtcatggctgaagcggaactcatgagcatggcgtttgagctgttccgaacattaaacttagagatatcgatccaatataataaccgaaaattgttaaatggtattcttcaggccattaacatccctactgaattaacaaatgacgtcattttatcattagacaaaatcgaaaagattgggattgatggtgtacgaaaagatgtattagagcgcggaatttctgaagaaatggctgatacaatatgtaatactgtattatcttgtctaaagcttacaattgttgactttaaagaagctttcaataaccaactcgttgccgatggcgtaaacgaattgcaacaattacagcaatatttaatcgctctcggaataaatgaaaatacgatattcaatccgtttttagcaagaggactgacaatgtacacaggtactgtatatgaaatcttcctaaaagatggctcaattacatctagcataggtagcggcggccgttacgataacattatcggagcattccgtggtgatagtatgaactatccaacagtcggtatttcattcggtttagacgttatttatgcagcactatcgcagaaagaaacaatctcatctacagcggatctatttatcatcccgctcgggacagaattacaatgcttacaaattgcccagcaattacgttctaccacttccttaaaaatcgaactcgaactagcaggacgcaaattaaaacgtgcccttaattatgccaataaagagaatatcccttatgtgcttattattggtgaagaagaacttagtacaaacactgttgtgctgcggaatatgaaggaaggtagtgagatgaaggttccgcttacttctttgaaaaataatacattgaataaatattttactacgcctactacgttatgactgtgaagtattctcaaaatgtaaatcaggtaaacaaaaaagggctgtccgcgcatgacagcccttttcccttaatgaacaacaccttcataagtgaaattatattaacgattttccgaatatatctatcataatttacactatatcaacgatacatagatttttcatttgatagataaccgggcaattagtttacataaaataattatactcaatttaatcttacaaaactttaacatccaattacctattttaataatatatggttttctaatttcactaccaatttaagaaaaattcatatccttctctactataccactttcatctattaacttttattttgtgcattcctactctccaaaactttctccatattatgagttgcccattccatcattaatagaatcattggacgaagtgattcaccaagctcggttaacgaatattctactttaggtggcacttcacggtatacttcacgatgtatgatgccatctgcttcaagttctctaagctgcagtgttaacattctttgtgtgatattaggttttaatctttttaattcattaaacctctttttcccatctaataaatgatacaaaataacacctttccattttccaccaatcacctcaaccatagcttcaactggacaagaatatttatttaaaaatgggtaatttatattattttcatttgaacaatccataataaatcccttcccttaacattagtatcttttttgatactataccacataaatgtgcgtacttgtatctatgttactttaaaaatataatttacttacaaaataaattaaagaaaagaggaacttttatgacaaatacaaacgaaattacaaaagagaaaattatggaggcttttcatttcagacatgcatgtaaagagttcgatcctatgcacaaaatttcagaagaggattttaaattcattttagaaacaggcagattatctccttcttcttttggatatgaaccttggaaatttattgtcgtacaaaataaagaattaagagaaaaactacaaccgtattcatggggcgctggtgggcaacttgcaacagcaagccatttcgtcattgttctttcaagaaacattaaagatatgcattatgatgcagagtatattaaatatatgatgaacgatattattggattgcctgaagacactcaaaaaattagatatgaattcttcaaaaagttccaggaaacagattttaacttattacaatccgatcgtactgtatttgattgggcatctaaacaaacttatattgctttaggtaatatgatgacgagcgcagctcaaatcggtattgattcttgtccgatagaaggattcgataaagagaaagtagactctttacttcgtcaagaaggcattatacagggcgataactttgaagtatctgttatggttgcctttggttaccgtaaagaagatccaaaacgtgataaaacaagacagactatagatacaattgttgaatggattaagtaatgtagcacacacaaataatgctcctaatagctggatacttatactaaagaactattagtcgtttttcttatgtatgaatttggtttttcatggaaagatatattagtatgtatgcagtttgagcactctattttttagagtcgaacaggaggagaatgaatatgtctgatattgaagttggcgaagtgtttactcttagtgatgagaataacgaagagcaagaagtagaagtacttggagcgatggatgtcgaaggcgcagaatatattgcagttgcctttgttgaagatatccaaacagaaactgaggaagacattgatattttctttttaaaagtagaagaagataatgagttttcatacattgaaaatgatgaagagtttgataaagtatctgctgcgtttgaaaagattttggatgagcaagagcaagaatagtatgaatgaaaaacacgagggcggatgcatatccgccctctttttattactcatccagagactcacgcagtaattgcagtacatctttcatcgcaaaaggtccatcttttttaacatgctccgcaaattctgaaacgagacgtaatgttctcacactttcgattggatgttctcctgatgcactttcagctgaaagcataactgcattcgtcccgtccagtacagcttgaaacacatcagtcacctcagcccttgttggaatagaatgatctaccatagattgaagcatttgtgttgctgtaatgacatatgtattcgttcgattacattcctgaatcatcattttctgtaaaagcggaatgcattgatacggtaactctactcctaaatcgccccttgcaatcataattccatctgcttctttacatatatcctgaaaattctcgattgcttccatcgtttctatttttgcaattatattaggtgacgtttctttatactgttgtataaaatctcgtatttcttttatatgactaggttttcttacgaaagaacatgcgataaaatcaacattctcctctaaaagaaactgaatatcttttttatctttctctgtaatagctggtaaacgaacagccgcacctggtaaattaactcctttatgagatgagatattgccacctgtttttaccttcgtttctattttgtccgtacttatcttttcaacaattaattcaacttctccatcattaattaaaattctactgcctactttcacatcattcggtattccttcataatcaacactcgcttctgtattactccctgtaactggttgtgtatgtaaaataaaagaatctcctgcctgaagtgtaatttgctctcccttcacttcacctaatcttattttaggtccttgtacatcacccaaaaatttaatagagtcatctaatgatttcactaaacgaatgatgtctttatgactttcatgcgtgccatgcgataaattcagtcgaataattttcataccattctttattaactgtgctaatgtttctttattattacttgcgggtccaattgtacaaattcgatcgattgtcatttttgtcaccatcctttttttaataagtttcccatatgaacttaaaaataacagagattctgacatgaatagatttaaatttacatgaatttcataaaattaaacctgtatcccttgctggctaagcattagaagatatattcgcttttttgcaaatgaagacatgttgaatcgaaagtaaaagaaaagttaagtatgggataaaccattgagagtttcgaaattttcatatattgtatgaattgagttcgaactcaaaaatttaaaaaggtgggaaaattagtgaatatgaaaaaatctttatcggtgacaactttagggttagcggttttaggttttggttttactaataacgcaagtgcttcagagatcgatactgtagacaagcagcccgttttagttgactttgatacaattcaatcaacaaaaacatctagtgttcctagtttgactattgcagctgcacctaagaatgactctaacattagcgtatatactcccttttttggtaacccatatgcagttgctaaatcgacatcaactacgaccgaagactatgtttatgcaaaagcaagaactttcaatggcgatagctcattagtaaatacgaaaagtaatagtgcaaaaaaatcatcctttgtaagtgctacagcgaccaacacaagcatttattatggagatgattacgctatcggtaatcatacctataaattaagtggttataatgatgtgaatcacgaaacaaaagctttctggtaagaaagagaaaaaagatatgcatcttgcatatcttttttctctaatattttacatatattgaggtgctatttatgaaacaaatatatattattagcggtgttttacttatttcattacttacaatttatattttgttcaatacttcaatcatacaacctcatccaccttccatagaaaataaacgcgagcaacaaaccaatactatttcttacggattgaaggataatcaaggccaacatattaacaatggcagtacaattactagtgaggataataaaattaatgtaacattatcattcgtacatactattaatgaaaaccgaaaatatggattaattgttctagaagattacgaacaaaaaccttttaaaatagaagatactactaatgaaatatcacactatttttttgatatgaaaccaaacagttcaatgactacgaaaatctctttacacacttctcctaatgcaagtgcattaacctttttaataataaaaaaacctgaatacaaattaaaagataataacttaaataaagcagctattttagaagatattctaagtatgcgatattcaatgcatcctcttcagaaagaaaacgaaaaaataaaactcccccttatagatccagatgctattttaaaagatggtctttacgaaccagtatttgttacgaaccgtgaagagaacttacaaactgtcttctttgaaaaggaaggcaagcaattaattttatcaaacggtaatgaaacaaatgatgaaatgacttacgcaatcgtggcttttaaagattggaaacaagttgaaatatttagcaatagaaaagtcgtttatactaaggttgcacctgaaacaagacaaatctttaatttcacattgccttcagtggatcaagaaagtaattttcaactcgtcgcttttccatttccttataaagttagcgaagaagattatgtcagtcaacaagcattcagttcctttcgcatcgtaattgaaaatgaaaataaataagttatactgtgcacattacaacaacctaaaaaaggcctactcacacgagtaggcttttgaaactatgaaagtttcgtcaataactgatttaaatcttttttcgttttcgtcgttaatgatttcattttattaacatcaatcttttccttctccgcccctacaattaacggatacatactttgaccgattgttttagaatccgtcggatgtgatgcttctagctctttttcaatcacatcccacttttcgttaatttgtttgccaagcttattcactgtttccaatttcggattagcagctaactgcttgtccaagctatcaattaatgctacaacttctttaacattcgttttcacagcaacacttttcttcggatctttcgttgcctttccgttattgtttgtgcttgtacttgtgctttgatctgctgttttcccgctagtcgtttgatcattcgtttttcctgtcgtttctttttcttttgtttttacattttcgttttgagttgacgttttgccgttactttctgttcctgatgattctttcgtattttttgcatccttatctgttttttcatttgaagaagtatttgtttctttttcagtatctttcgttgtttttgaagcttcatctgcacttgtcgtttttgcttctccatccttttgcgcagttacttgctctttcttttccgtttctttatctgctgaaggactacaagctgccatagtaagcattgtaccaattgtaatcgatgcgatagcgacctttttcattttcatataaatccccctatgttttacataatttatcctcccctttacgattcgattcccccttaaaaaatcccttttcatacgaattatcatctttccgacagtaatcttcataataatacgtacaaaaactgataaactcattttaatattcgagtttcttctacttcatttttctgctcacaagtaaaagaaaaagagtatattgtcacattaagaattactatcttcatatgacaatatactcttctatcaaatttttatctttcttgacattttatttatacaaaaaaataaaattttctttcgttttttgtttctcaacatttgttaacataatatttttatgaataaccaccattcgagtgaatgacttgcccagtaacccatttcgcttcttcacttactaaaaaagaaattaagcgcgcagcatccaccggttctcctactttaccttgcgggaatttccatactaaatgatgcttcagctcctctgtaatccatcctgtattcgtcggtcctggatctacagcattcactgtaatccccttctccattgcaactggtgctactgactttgtaaatgcttcaattgcccctttcgttgctgcatatgctagttcatctggcattgggcctactgactgtcctgaagtaagattaataatactcccgcccgttttaagtgaataatgttttataaacattgaacttaatagcatagtagcccgaacattaactgtataatgtttatccaactgctctacatctaattcctcaatcctcgtatgattagaatacactgcattattaactagaatagatggatcacctaaccgttctgataccatataaaacaaacgatttggcgaataagactgcgataaattgatttctgccatttcacatcgaacatcgtaactttcaatttcctttttcagcaaaaagggttcttgatcactcattccccatggcatcgctttatcatactttggccagtacgtgaaaaaaatgtctatccccttttgagcaagcaccttgcatacagctgcaccaattccattcagacgagttgcccctgttacaattgctattttcttcacctttttctcctccatctatacacagatcccctgcatgaatacagaggatctatcttcttattgaatatttgacagtatacgttcagcacctaattttaacattttaataaagatataatttacaatcgtaaacattacaaataaaacgataaacataacccacagtccgacatgaaggaagaagtataatacacttactccccccacaataattaaagctattaaaatattagctaaaaaattccacaaagttgtatatcgacttttaaataatttctgctctgtatcccaatgaatatctgcagtttgtgcgtcccagcgtgttccgattaaattaattaataacaacccgttcgcacttagtaaaaaccacagtatcataaagactggagaaatcccagctacaactgccatcgtaataccgaatactgctaaaatgatcacattaattaaccaagcagtgattgctttcgcaaaaaagatatccgaagcctttactggtaaataacgattcacaaaccaagagcttccatctcgcgaaaatgacgttgttgcaatgacgttactacccattaaaaataacgatgcacaaaggccaacaccaattgcaaatcccgttgtctctggattgttaatatactctgtaataaactttaaatttccatcttgcacaaataaaataaagaacaacataattggcataacgaaagtttgtacaatgcaatttaagaaaaattgtggtgtacggaataacgttttaaattcttttttcacatacgcttttaaatgcgaactttgtactgttgatttctgtaaaccttccgccgaaataacttgtttctttgctgtactcgtcgaaagtccaataaccccttttaaatatgtacgctctgctatgtaataaaacaacacaaagaagacaaatgaaataactgcaaagattattacatataaaggtcccttccaatttgcattttctactaatgccactgctccaaaatatgtagttggaaaatagtttgtcatttgtactaaaagagaagactggttgtttgcaaggtaatccgcaattgcatcttcagaaaacgaacttttatttttccactgcaaaaatacgttaattcctacaataaatagtatacttacgattccaataaatatatttcctcggtctttatttttcgctatatttgtatacctcataataactgtcatcagtaacgaagctagtactaacggcacaattgggaagagtaagtaaatgaaaatcatatatatgtaatatgtaataaatgcgccactttttaaaccgtacgtaataaagatcggtaataaaataaatgaactcattacgtattgtgtaattaatactgttaaaaatttggctgaaataatttgcgctggttttaatggtaatggtaataacatttcaatgtcattgctgtagtaaaatacagttaaaatgttcgtaatactcattaaaaatacccatatactcgcaatcgcaagtcccattgcgataatcattcctggatcttgccctaaatgtatcattccctcatacattgcatgcgtgatagaaccaaacagtaaaaagccgacaaataaaatagctgcaaatgaaaatacatacgcccatcgcttcttcttatctgttataaaatctgcataatttaatttcaataataccttcgttaacgtccaaattttactcattgcccgtcatctccaagaacattttttcaagtgattcattggatttaaaatgatctctcatttcatctaaatttcctttaaactgtaaattccccttattaataatagcaacccggtcacatattttttccgctacttctaatacgtgtgtagagaaaaatacaatctttcctttatccgcatgctctctcatcatttcttttaaaatatatgcagatttcggatcaagcccagttaatggttcatctaaaatccatacatctggctcatgtacgagcacaccaataataacgattttttgtctcataccgtgcgaataactttgaatttgatcagataaagcattataaagatcaaacttcttcgctaaagactctattcgttcttgtcgtacttctttcggcacttcatacatatcggccataaagtttaaatattcaattccttttaatcgtaaaaacatatctggactatctggtacataaccaaacgtcttcttcgcttccatcggctcttccataatattttttccgttaatcgtaatagtccctttgtccaccccgtgaatgccagtaatcatcttaattgtcgttgatttacccgcaccattcggtcctaaaaatccaaagatttcgccgctaggtacagataaacttaagtcttttactgcataggtagacccattataactttttgacacattcgtaatttcaatcattccatccaatcctttccttaattaccaaataactatattgatattatagcatagttctattttaatatttttacatttttcagtttatttaacctttaaaataaatatacacccctaatccaacaactaaaacgacagctagtataatataaatcattgttaagcgtttaatattcccctttgtcgctttgctataatttgcatcaccattccgcccaattaacaccgtcgcaatgacagtaatcactacaagtaatacaacgatcatgatccaagttagcatttcttcctccccctccttacaaccattttacaatattatcctctttatttcgcagcatatttcctctttttactattattatgaagcaaactggaaaactattattaccattcctatccaattgcgatatatttataacataacgtgacttatttctaacaacataaggaggacctatcatgaaaacaacttggataaaatatttaggatttctcggtttcttcggatttttttatgaaaaaggattgtttactatgttctgtttcttctcctttttcacatcgtatagaacagttcaacacgatgaactgtttgaacaaattgtcaataaatcgtgtcgcaatgcatttatcgttacgttactaactaccacaatcattatgtttattgaaatgttatttccaaaccctacgctacaagagattgatatcgctcttattttcggcacactcattcttacattcggcttttctatgttctttttcgataaaccaattgatgaaatggaagatgcaccatggcgttcgtaacgagaataaaagaataccgtgccaaattgaacatgacacaagaagatttagcgaagagcgttggtgtgcgacgtgaaacaattagtcatctcgaaaaaggtaaatacaacccttccttacaacttgctcacgatatagcgaaggcattacatagtacgattgatgagatttttatttttgaggattgattaaagacgtccagtcacaagaatcacataaaaaaataccgtcattctttccaagaagaatgacggtatttctcattgattatccatataaaaccgcatgaaatacgcctaatagcaagtattgatcctgcatgtaatcttcatcatatacattcatctcaatgtaatacatatcttcctcaagacgaatattccaatctgcaattacatagccctttcgtaataactttcccattccaaatgaagttttatgaacaacatattcttctgccttatatgtaaaggtaaataagaaatttgcatccaataactttccgtcacatacaagtatttcatgctctgcatcatgattatctttgtacgttactaaaatccttctttggcgctgcctacttacatcctttgcaatgacgcgaatattgtccttactatcctttatttcataaataatattaccaccaatttttggaatgaaatccagcactctcatcagcgtatttttataatagccccttactacgcctacttgctcacttccattataaacctctatcggtgtcgtatctgctttgctatcacacggtcgtttgtaagagagctgcatcattcgctctcctcttaagtactgatcaaacgtcacaggatattctatcatgcgcagttctttatttagctcatacaaatagcgttgaacactctctattaatgttgtagtagctatacgctcttgaagttcaaattcttgccagctggaaaaaacattccattgattatgatcctcttcatagaagaaaccaagaattacctcttcacggtcagccgtttcatatttcataggcacgttctgcccatgttgaacttgttccatccactgacctaaataaatgcccagctctgcaaccttcatacatgatttttgaaaaaatacgctgtcactcgcgcaaatcgttacatctccttcgataaagccctttgaataagcatcataccgtggctcatccttctgcgggatactcttatctaactcaaataaaaacgttaacatcctttattcacctctagttgttacactaatcatacatgacatcgcatcactctgagagactatttatatacgcatatttaattcacgcattataacacgtgaatgatcttgtatagtagcgctattttttgttctatatcttagtatatgaatttatatgagcgatttttcaaatatatctatcacaacttacaatatatcaacgatttttcaaatatatcgatttttcgacaaatatcagcacaattaaaatgaaactaccttttcttcagccacttctacaatttctaaaatttgtagcagactctccacttcataagtcggattaacactcgtcttattctctttcaaactcggattataccaacacgtatcaatgccgaagtcttctccgcctttcatatcagaagttagcgaatctccgaccattagtacacttgatttatccgtaattccaaatttctcaaatgcataatcaaaaatctcacgcgctggtttttgatgaccaacttcttcagaaataataatgtgatcaaagaaattacataaaggcgaatttccgattcttgattgttgcaccttcgtatatccattcgtaataatacctaacttgcaatcttgaagattttcacataattgtactgcgccttctataagatgtacctcttttcctaagttttcaagatatacatcactaaattgctgtgcatctacttttatattatgaagggcaaataattgtctaaatcgatctactgctaattcacttagcgtaatcattttattttctagatctctccataatccattactaatctctttataacttgcaagataatcattataccctgtaggcataccaaactgtacaaacgcattatgtaatgcgtgtctttctgtttcagggaaatctaataatgtatcgtctacgtcgaataatataaatttgtatttcatgatgttctcctcaattcctattttaaaagcttcgttctcattgcttataagtttttatatatgtcgtgatgaagcgctttaacccgctctttatagaatacacctttatcttttattttcaaatgtgctataaataagtttgctagcatgactgctgtatctagtctataaaataaactaacaatatgaggagtaacattaaagatactatcattcttatatccatctttaaattcatcccaactaacctcatttgtttcagctattctcataagctccagcaatggatgaccaattaaagcattatcccaatcaactattgctttaacttctccattatatccgattaaattggctggtcgaatgtccatatgtaataaacattttacatgatctgctgtactaagaatatattcaattgtttttgtatccggaagattaattttgcagttcgtgattgtattaaacccttctatccgtttcacaattcgttctgctatatacttactaatgggctctctaatattttgtttgtaatacaaaccatcaattggcatactatgaagattgctcactaactcccctattttgcatgcggaaattggcatatgatcagcatacacacaatccgaaattaaaaaatcaagttcggttgaaagatgcaatccgtgtatccttggtactggaataccttttgaatgacaatacttagacagctccgcttccttttgcaacgaaatccgactgttaaataagtcttcatttatattttccacttctctttcccacggtactcgaaatgccaaagaccccttttctgaatctccttgaaaaacaatattttgcactcccgttccaatcacctttaaatcttgaatagctagttccttatactcttgacttagtattgttgccagcttttctcttatcccctctgcttttacacgtgtatgaatcattttattccccgattcttaagctcttttcatccattttctcctcggtgcacaacatcctcattaacaaaattatagcaacaatagtaaaaggaggctaatccgctcagcctccttctcattattaatcttctagcaataactctttcatttcctctaacgactctttcgtaaagccaagagctttttcagcgtatgcttcaactgatccgtattgcttttgaatttcaccaatcgcagcttgcaagtattcagcacgtgcttcaaacattgcacctaatatcgctctgctctcatcgttttgtaatttcgcacctaaaaaggccatcattttttcatttagcttttcacggaatccgttacttagtaagtagtcttccattactgttttttctggtacacctagtaaaagtagtaataatgctgaaccaaatccagtacgatcttttccagctgtacagtggtttactaacggtaagttttccgggttttgcgctaagtttaagaagctcacgaatgcttcattaccacttacgaaatcttgattcattttcacaagatactcacctggttttcctaacatagaaaggtcaccaacttggaaaaactcatttatatttaagtctttcgctaagtcttgcataactggtaagcacacttgacgagcacctgtaatttctggattcggcttatgcttcacttcaaagtctgtacggtaatcgcaaattaactttaaaccagacttttgtaaataggcaatatcccattcagttagccctgctaattcttcagagcggtataatttgccccattttactttacggccttcagtcgtttcatatcctcccatatcacggaagttaaacgcaccttgtaatggcaatctacgctcggctactgttactgcttgtccattacttcctactaatctaaaatatggacgttcattttcactggggttttcaattgtatatgataattccccatttactgttgcaagtaattctccattttcttcaatatgatctggtgaagtactccaataaatacgaacttcttctatattattttcccactttatttgtaacgtattatctttatttctttctacagttgcttgtaaccaatttctttgctgtcccattctttcaccaacgctttctcatataatcgaatctcactctattgtattatacaaatatctactttgtcgttctcatttttctttttatcttacaaacaggcgaaaagttcttttacttgttcaaaatttgtacaaggattaccgcgaaatacgtatgcgatttgttcattacctaaatcttcgtatacaactgttccgcgattagggtgcggataaaactctaacccgtttataatttgttttgggccatagttcattgtccatgaagaaataggataatacgctttgtttttatgtctacaaacccaaagtgcatatagtttattaacttcgtcccagtatacatactgcgtttcgtcatttccgaaaccgaccgattcaagtttccaatttagtttttcatgaattaacaaatttacataggatacgtcatctggagcattccactctctacatcttcctatctcaccaattccatctctttttgcttgaaagctcaataggtgaaatggtgtatgtaatatcattttcgcaaactccatatttactggttgtaacccgaatagaaatctttccatttcatctttgtttacatacccacgatcaatagaaatttcaacttgtgttttccatatagatgtaacgtaactttcttttcctttataatttatacctttccaatacacaagccctttatattgaaaacaatctccttttgcttgagaaatacagctatccggaaatactggttccattatatcgagaaaaaattcctttactcgaaacatcccagttggagtaacaacctgaaaccaaaaagttccccacttttcaccttcataacgttctgaaactttttcaacattccagccttctaacaatacatttggatacaataacacgaatgaatgcatggattgctttaacatatatagtcccctcccgctatacgagttcgagagtatacatcattcatcctcctaaaactttctcacatatctctcagttgaactaagcagctgacatccattcttttcaaaaacatccttcatccattcattttgtatatttgtctcaccaatataataagatgcacctatttcctttaagacaaacatcgcagctgcaaataatgccgcttcatatcccttattacgcatatttggagtaactgcgaagtacataagtttcccttcttctaacgtacctctttcaatatgcgggattacaattcctatcggctcttcatcgacactcgctgttaagcaatgttctttccattgctcaccaatttcttgtagcatcatatgcacaaattgatcatgagcgactggttctcccgtcgcttcattccacagtgaataaaaagcctcttctccaacttcttcaataagcttaaaatcaatttcactttctgcatcttctacttcatatatatctttaaatacaatcatgttttccgtaacatattcaaatgaatacgtttcaaaacattttttatacacatcataatttggactttttgaagagatttcaaaatgtagtttttctaatccatcttttttagcttcagcaacgcaatattgcatcatttcctctaattgctcttctgtaaaaatctctgcattattttcttttatcataatagaagaagcatttcttcttattttaaaatatttttctaactgttctatcgtcgtcatattcttccctcatctatatcatactcgaatttctaatcgttctccttgcatgagcaggattgtccttgaatatatagaatactagaaaagatcgcatctttaaagtgcggaggaggttctccagtggatattacagcattgcaacaacagttagagcttatacaacaaaatgactatacgcaactacagcatatagacgtaaatgagttaactttgaacatgcttcagtatatcggaacgactgatagctacgttcgttaccaacttatatataaatgttttgcgcatttcattcatcatgaattccttatggatgatcagctgaaattacttctgcaaacttgtttaagtgatgagtatttatattgtgacatttactccccacattcagatggggttttcacacgttcttacactatttcgttaattgcgttaatactccaatttgctaattcgcactacttttgtacagaggaggatatcgaagaaataaaaaacaaactcattacatacacaaacttagaaacggattttcggggctatatcgaaaataaaggatgggctcattgtcttgctcacgtatctgatgcctttactgaaattgttcataatacgtatacaacttttgaatggtacgaagaattaattcattgtttattaaataaaatctttattccatctgacctttttcataataacgaagatgaacgcattgttactccattactagcaatgctgtatcatgattttcctcaaaacgagttaatttctattattcataaaaaaataaaaaggcttcctcaaattagaaaacgcctttcgcttaatgagtattgtattttatgtgccaatattaaaacctttttacgcacattatttttcagaacgaaagatgaccataacttagcctttacagcacgtaaaacagaaagaatgttaaaagaacttcctaactattattaaatacaaggagcaatgacatgggttatattgaagatatgagaaatctagtaggaaatcatccacttattttaataggatcacacgccattatattaaatgaaaaagatgaagtattgctgcagctccgtacagattttaaacgctggggcattattggaggcgcattagaatataacgaaacgttagaagaagctttaaaacgagaagtatatgaagaaactggacttatcattaaaaatccagaactattccgtacatactcagggcctgatttctttcaaatctatccaaacggcgatcaagtacacggtgtactcgttgtttatatttgccgagaattttatggtgaatttgtatgcgatcaaagtgaatcaaaagaactacgcttcttttcacttgatgaattacctaataatcttccccctgttattgagaggattattacagattatcaaaaaaaataagggaacgcttaacgttccctctcaaatccaatccgttttttaatttccgctaaatttacctttgcaatagcgcgtgccttctcagcaccgttttctaatgcttcatataataaatccggctcattcatatacattgcgtacttttcacgaggtccagctaactctcgatctacaacgcgaaacaactctttttttacatcgccccatccgattccagtctcatatttttcacgtaatgactgtatttcgtcttctgtcgcaaattctttataaattgtaaataaggtttctagttctttcggttcatttggaagtgaagaatctgttttgattttaaatattaactttcgtagtttttcttgctctgcaaataatgggattacatttccgtaacttttactcatcttccttccgtcaagaccaggtaaaatagctccttcttcttgtatgacatactccggaagtgtaaatgtcgtgccaaatgtatgattaaaatacgtcgcaatatcacgcgcgatttcaatatgctgaatttggtcttttccaactggtacatgggtagcttgaaataataatatgtcagctgccattaaaatcggatacgtatataaccccatattcactcctgcatcgacctctaaccccgcttctttattttgctccaccttcgctttatacgcatgagcacggttcataagacctttcggagttaggcaagctaaaatccaagctaattctagaatttctggtacttctgtttgccgataaaaaacaacatcttccccaagtccaagcgataaccaagtagctgctacctctttcgtataactgctgaacttttctgaatcatgcacagcatttaatgcatgataatcagctataaagtacaatgcttttccttcattattctttgacatttgtaatgcaggtttaatcgcaccaatataattccctaaatgcggataacctgtcggcttaattcctgttaacattattttttcactcacactaactcctcctttcgcaaaataaaaagagcccctcatccttaaaaaggacgagagactcccgcggtaccaccttaattagctatcattagctcacttcatacttcaataacgtgaagtaactgtctttacctactcatttcagttagaagctccagagtccattccatattcatcccttactgattctcaccacatatcagctctctgaaaagtttcgaatatgtactcttctctttcattgctttttcgttattttttacagtttatcacatttcacttccaaacaaacccgaattttctattttatatagcaggaatttccacttcaattgtctaatattatataggtttgcagaaatattcgaaacaactttggaggttttttcatggtaaaatatatatccattttaggttccacaggatccatcggcacatctgcattagatgtcgtttcagctcatcctgaacatttcaaaatcgtcggtttaaccgcaaattataatatcgatcttcttgagcaacaaatcaaaacgtttcaacctcgtattgtaagcgttgcaacaaaagacttagcagacacgcttcgtacgcgtatttcagcgaatacaaaaatcacatacggaactgatggcttaattgcggtagctactcaccctgattcaaatcttgtattaagttctgttgtcggagtttccggactacttccaacgattgaagcattaaaggcgaagaaagatattgccatcgctaataaagaaacgttagttgcagctggacatatcgtaactgaactagcgaaacaaaacggatgtcgcttaattccagtagatagcgaacattcagctattttccaatgtttaaacggagaaaataataaagaaattgagaaattaatcgttacagcttctggcggtgcattccgtgataaaacacgtgatgaaatgcaaacattacaagcaaaagatgctttaaagcacccaaactggttaatgggcgcaaaactaacgattgattctgccacattaatgaataaagggttcgaagtaatggaagcgagatggctatttgatattccatatgaaaaaattgatgtaatgattcataaagaaagtatcattcattctttagtagaatttattgatggatcagttatggcacagctcggtgctcctgatatgagaatgccgattcaatatgcgtttcactatcctactcggctaccttcttcctatgaaaaattaaatttattagaaatcggtagtttacattttgaaaaaccagatttagagaagttcccttgtctacaatacgcatatgaatgtggcaaaatcggtggtactactcccgctgtattaaatgcagcaaatgaacttgcgaatgcactattcttaaaaaatgaaattgcctttttcgatattgaaaaaacaatttacaaaacagttgaagctcatcataacgtaaaagatccttcactagatgctatattagaagcggatcaatgggcgcgccaatatgcaaatgaattgttaataaaaaagcgctaaaacagttcccactgttttagcgctttttttcacgtattcaacttaacaaatctataaccgtgtgtaactaacacttttaatatcgcataccctggaatcgctaaaataatccccataatcccgaataagtttccggcagttaaaatgataaaaatgatagtaatcgggtgaatatctaactttttacccatgacttgcggagaaataaatttaccttctgctaattgtacaaccatcataacgatgattacttttaacaccattgctggcgagtcgataaatgcgataattaacgctggtgtaatggcgataattggtcctacgtacggaacgatatttacaatcatcgctaaaatagcaagcagtacagcatatttaataccgataataaggtaaccgattaataacataataccgataaataagctcacgataatttgacctctaatatacgagctaatcgcataatgcatatcatctagtattctcattgctgctggttgtctttgctctgaaataaactttaaaaagtgattcggcaattgctcaccatcttttaaaagatagaacaatataaatggaaccattacaaatgttaaaacaacctctgtaacagtactcaaaaatccagttacattcccagttactgatgataatgactttgtaaaatcaactgtgtattcttttaccatattcgcaacattaatatttaaattctcttgaattttaccgagtaaattactttccccgaatctacgtgctgcttgttcaatctcatggccaaaatacggtaagttatcaattaatgcatcaatttgatctttaataatagggataaccgttacaactaaaaatacaaataatcctagtacgattaaatatatggaagctatcgatacgattcttgaaacacctttcttttctaaaagcgaaacgaatggatgtaaaatatagaatagtacgcctgctaatagtactgggaagaaaattgtttttaaaaatacgataaacggtgtaaaaacaaatgatatttttgttagcaataaaatattaatgaacaataacgcaaatccaagtaataccgccaaataattttgttctctaaaaaactttcttaacttatctctttttcttatatttattttctccaatgaaaccacctcttcgaatgatgaaaagcccttattcagggctcttcatcataatctatatatctatttctttgcagctttcactacaaatgatacaataaaaattaacacgattgcacctaataatgctggcacgacgtgaatcccaccaaatgatggcccaaaggagccaaataatctaccacctaacgaagcacctaataaacctgcgataatatttccgaacataccacctgggaaatttttacctgttatagaactagcaattgcacctataatagcaccaactattaatgtgataatccaccccatttttagtcctccatttctattatagtttgtatgatttaatacaaacatatgtatttatcattgctaaccatatttcactatagaaatatatttactactattttacatatggagatacatatattatatgcaaaaaagaaaaatattgtcaaactcacccataaagcaattatattcatataccatatttaaaggaggcttcattatctatgattcttaagttaaattccacttcttttgaagtagcaacatccattttacaggttcaaattccagcttataaagttgaagcaggctacttaaatagtactgccatacctcgtttatatgatactgtaaacgatattcaaaattgcgttgaaacattctatggatatttttctgaaaataaacttgtcggttttatttcttttgtacaagaagaaaaactaatcgatatccacaggctagttgtatcgcccgatttttttcaaaaaggaatcgcaacgaaactcctaatttatatatttaacatgtttccctcttcaatgacatacattgtacaaacaggtaaagcgaatacccctgctattactttatataaaaaacacggattcattacagtatcagatacaatacttcctgacggtatgattcttacgcaattaaaaaagacagaatacacaaaataatttgacttgttcgctcctttatgttattttttactttataaaaccttttgctgagtccaaattttggagcgggggaaccatttttgtagctatgctacttggggcgaatcttttttaagtagggaaactctcacttcccgagtccgacagctaacctcgtaagcgtaatgggagaggaaggtgctttttgcctatgttacacattttgcctccttaattataaatatgggatcgatatcaaatagtcacctatatttatagaaaaggagaatgtattatgttacgtttatctgatcacgcaataaaaatgatggagcaaagactccgaattgaaaaacaacgcacatatcaagcaaataaagttgtagataacttacatcacaaatacttctttcagcatattttccaaccgaaaagatgaagaaaatgtttatttaatattaaaaaacacaaggtgtgtcttacaaagactttccttgtgttttttatattctttataaaattctcactatatttaagcttgctgtaatcgcacctgctatagtagtcacatgccctacacctaacgggccattttgtaatattaatgttgaattggcactcgtcacattcacaagaagtgtatttgaaatggctggttcgattactacagttgatgtcgttacgttttgtataaaactccctgttagttgcgttccatttaatagcaatctaacagatactgtctcattcctaccattggcatccccttgaaaatattacaccttttatatgaaatgcatttttataagaaaagtacacctttgacctcatttttttaaaataaagaagcctatcatttcatctatttgaaatgataggcttctttttataaaacaatttacttcctcgccttaataataaaagtagttggcaccatcctagctttatataaagaataatatttcgtagacggctcagctagttctccatcaagcgagctcgatggttcaggctcttctattctctcaattttaaatcccgctctatttaactcatttatgtatgtacttatttttctcttatgtaatgtcgcttgtacattttctcctttaaaagtttcaaacgtaatgggcgtttcctcatgataagaagactttatagcaacttcttccgtaccatactgtaagtttgaatatactgggtgctcccaactaaaaataaaacttccccctggctttacatatgaataaatcagttccaacgtttttcttaaatctgaagtccaacctaatgcataaatggaatatacaatatcaaaatatcctttcggaatatctccttcttcttccattgctccgcatactaactttggattccaatcctttaacgtcttattcgctatttcaatttgtgtactcgaaagatcaagcccccataattcctctgccccttgttccgccatatattgcaacgaatgcccacttccacagccaatatcaagaacctttttctttctgattgaatcgaacaaacgaatctcatcttcagacgccgtatacggaccatatttaggtaaacaatccacttgaaagaaataaggtgcaactgtatcccaacactttttatttgtagctagcatttgtgtgcctttcatattattcattcccccatccatttttctttctctaatattacttacatatcataaccagatcgcccttttctcttcgccctgtagtttttcactttcgcaatcgtaccgcatgctcttcctccttcttctccagcatacataccgcaccatcttttacttccatttcgcgaatgatcataaaatacccagcgacaatctggacatgcttttaaccttccccacacattttcttgaattgacattaacacaatgcttaacacttttgtatacacattctcttcatatactggttcatatgtaatacctttcatatcatcctttatatgtacatgaaatgggtatttctctaaccatttttgcaatgattcttcgccttcaattgtcatccgaatatcttctcgaaaacctcttaattcctctatcgtatgaaatggaaactcttcatcaaaatattctttcataaagagctttatatcttcttttgtttgcagcaaatcaattggctctctcgtatcgtttggtattctccatgtatttaaaaattcccgaatatattctagttcatttggagcgttttgattcaattcaatccaccttcttcttaaaatttacttttttctgactttatgtataattataatataaagtagttaaccatcaaataattttactggttacataattaggaggatttctatgaaaagtttctcaacaccgatacgtttcatgcttatttcttcattttttatgtcttttgggtattttgcagtatacgcatttttagctatttatctattaacctttcttcatttttctgctgtccaagtaggaacagtgttgacgattatgacaattacatcacgagttatcccattattctcagggttaattgctgacaaaataggctatatcattatgatgatagccggattatttttaagaggagtcggatttatcgctttaggaatatgctctgatttctatacaatttctattttttctgcacttattggcttcggaactgcattttacgaacctgccgctcgcgctatatttggctcacagccagctcatttgagaaaaaatttatttacatatttaaaccttagctttaattgcggtgcaataatcggaccaattgcaggaggattcttactcttactcgatccactctacgctttctctctaacaggatctcttatgctgttatttgcttttattttttacttacttaaaaatcacttccaagtcactactgaaaacacgtctattacattaggaatacaggtcatcttacaaaacaaatctttccttctgttttcctttatcatgattttcttctatattatgtttactcagcttactgtcgcacttccacttcatatgaaaaacattagtaatagcaatcaacttgctacactcgttattacgataaatgcgataacaggcgtcatatttatggtattattccgaaaattattccacaaatacaacacactttcgattattaaatacggtgttttattaatgagtatttcctttttactcattcctttatttcaacacccatattggttctttatttgtgtaattttatttacaatcggtgaaacactcgtattacctaacgctgatatcgctattgcaaattacagtaatgaatcatatacagccactttcttcggattttatcaactatcactcgcatttggttttatcattggtaattataccggtacatcttttacatccaacttaagcggaatgtatacaccatggcttatttttggcggaataggacttattggttttatttcactacatattttgaatataaaaaaagtggcctctaaagaggatatacacctatgtaatacaagcgacctataacgaaaaagattcgaccatcatatgtgacagtcgaatctttttatttttcatattcaaggtgattatgtcttttacaacgaaataaatagcaagcccctatataatcagtttcaaactctaatcctggaacgtatccagatttgatacgttctaccattgttttataacaattattctcttctgtatattccttaattaactctttcttatcattttctgtccagttttcttctacttcttcactctgaacatcttctatttctgctgttttcgcttcgatagattcccgtataacttcatttatacgggagaaattattcgttttatatagagcatacacaaatctaccaatccaattaggacttttccagcattctttatatcccttttcgaaccattcaattgcttctttatagcaattcaattcaacatataaatctgctacattaatttcccctaaaaaattatcagattccctgttaaaagtatctaacttctcttttgcttctgtcgttcgttctaaatcaattaaacattttacatagctatacatgatatagtccgaatcccctgcaactcgtaaaaaaaattccgaagctttttccagctctccaagattataatgagctacagctagattgtgatatgcttcatcggatggttgaatcgaaatagatttttgtaatacttctttcgcttctgtccatttttcttgtttcatgtaaatgtcccctaagatgttataaggaaagtatgaagaaggattcaacttaacaacttctcttattaattcaagagctttatcatcattctcttcctcatagaagtacatccaagcaagattattgagagattgtacgtctctagattcatgtactgcttgttgaaacagttccattgcttcctcatatttattttgttcaaacatttcaattgccttctcgttaatgttcaaataactacctccgaagtgaataaattcatctacgctttatcattattttaagatgtaaaaattgaaatttctataaaaaatttctttatcctgtctacatttcgattgaaatagaagctaaaacacacgaatttacaacaatgagtaaatttttcaatctcccttaaattggatatacatcctgttttattttacatattatggtacaatcaaaagggtactaactaaacatttacgctccacactagtaatctagcaataccaaaatcaaaattcacatggaattgagggatgttatgaaacagaaattagctgttcttctattcactggaatcatattatcaggatgttcaactatagcagagaattctttagaaagcgggaaaggcagtatggaattattaacaccaacgatcacagcaaaagataatgaattagaaattaaaactaaaggcattgatgaaaataaagtaacttttatttatgttgctaataaaaaagtattggaacaaaaactaaaaaatggtgaatcctacaagcttaatattaaagatatcgaacacgctcataggacagactacaaaccaaaagttcaacttttccaaacgaaagatgataatgatgatggagaaatggtaaccttcaaacaagttagatatacagttaaaaactgattttaaagttgtttcattataaatgtaacgaacgaaaatatacttttaacagtagataaatgtagggggtgctaacatgaaaaaacgatggatttcttggtggattggtaacatattttggattatcgtttttggaatatgggccgctattatttggctacgagatgttgatggtgctggtgttattcaaacacctgaaattaaatcaatatcacttatcgttttattaattgcgtttatcataccggtattttttcaaattatatggctaatcattaatttgagaatgagtaaaaaaaataattatacgatttagtttttttgaattaacagatcaatatttttcataaaaaaagagaggaatctacatcaaaatagattcctccttttacatttggacttatactgcacttttactgcagcactactcctcttttttacgatgcatgttcatctttcttcttcattaacgctcttttcttcatcgccttcgttaaatatccacccttaaacgagcgaatttcatacgaagacataaacgctttcggtgcaatttcattaatgatttctaaaagctctttctctctagaacgctttgcgacgatatctaagcgataacgtatagaattaataccttcgccttcaaatactgtaacgccaaatccagagtgacgtaactcatctactaattcattacaacggtctagtaaactaacttgatacgtaatataaccaattgctaatttattctctatataaccgcctaataacagtcccgcactaaagccaatgacataggcaacgatgttcatccaatttgataaatcttgaaacacaatacctaaactgacaatgtaaatagctccttctaacaatccaacaccagcagcggatcttgtttgattctttacaagcaaaatcgtacggattgttaaaattggaacgtaaataatttgtagcacaaaaataagtagcgcttgtaacattggtatccacctctttcaaaaagtcttttgtcataataacatacataacctttagaaatcgatgggttttttaaaatttttttattatttttcatactattgaaaaacgtaaaaaagaagcgtattatatttgtcgttaatttgtttacttgtatcaaatcactaaaataaaaaaggaacccgattaggtccctttcatcatagctctatgtttttcgaagcatgttccctttgcttctcttcttctttcactaactgcatatttgcatacgctaaatttgcaatcattaaaaagtggccacctaaaatacctgtaccgaatgcccacatttccatctcatgctcaatttcatacatgatgatagcccctaaaatagcagctgcaaatcggtttaaaactcctaatccaggagccttttccttcattacgatactttttccgagtttctccactctgcgagctaataaccaaagacaataggcgcttactgctaatccaataccgaaccctgtcacttgttttccaaacggagtaatcgtccacataagtagtaaaccactaaagatcacatacaattgtaatcgatatacacgtaaggcttcttgaatcaaaatatccgctcctaagttctcattttttgtactttagaagaaaagcagcaacttacacagttgctgctttctcttcttcttgttcttgttccatcttacgaatttcaacacgtttaatttggtaagcgtctttttctaacactttaaattcataaccttccgcgtcaacatgttgtccttcttcgatttcatgattttgcatcataatccatccaccgattgtatccacatcatcttcttcgatgtgtaatccaaataaatctttcacttctgaaataagcacttttccatcaacaatgatatgttgctcgttcacatgttgaattggcggtgcctcatcttcatcatattcgtcacgaatttcgccgacgatttcctccaagatatcttcaagcgttacaattccggctgttcctccgtactcatcatataaaacagccatcggaattcgcttcttctgcatttgaagtaataaatcgtgaattggagtcgtttccatcacttcaataatcggacgcatatacgagcgaatagatgataaatctttttgatcctcggtcatatatcgaataaagaaatcttttacgttgaccataccgataatatcatctttatcttctccaaaaatcggataacgtgtgtatcgctcattttggattactttcatgtgttcttctactgaatcttccaggtagaaaccaacgatttctgttcgcggtaccataatctcttttgcaatacgattatcaaattcaaaaatgttatttacatacttgtattcagcttgattaatttcgccactttcatagctatctgaaaggataagacgtaattcttcttctgtatgagctacttcatgttctgaagctggctttaaaccgaataaaccagttatcacacgagctgaaccgttcaatacccaaataaatggatacattactttatagaacatcattaatggacctgccaataataacgttaccctttcagccttttgaattgccatcgttttcggagctaattcccctactacaacgtgtaaatacgtcataatcataaaagcaagaccaaatgttaatactgatgaaatagaaggatttaagttccatttctcaaataacgggtgtaataacttttcaattgtcggttcacctaaccaacctaatcccatagctgtaactgtaatacctaattgacaagcagataaatattcatctaaatttgttgttacctttttcgctgctaaagcaccgcgttttccttccgcaacaagctgatcgatacgacttgaacgtatctttacaatcgcaaactctgctgctacgaaaaatccagtaaatgcgattaaaatcgcaaccatgactaaattaaatatttccaatgaatccccttagttaaaaaactaaggtgtccacctcctgtatactataatgttttcttatttgtttgttagaaaacatagcccgatacaaaaattaaagaggtcggatttcacttattctataataatagagcaagtgtctgtattaaagctgtcgtttgacctgataaagatttcgatattttttcacgttgtgaatcagtcaattcatctaaaagcggctttaactcagtaagctccacttctaattgatgaatatggtctgtcacttcattcacttgtttcgaaacgtgttcattgataccgagcagcttcttcttctcctcgattttctctttaatctcacaaagcggcatatgcatttctttgcacttctcaataaattgtaatgtctcaaatgctgtttcgtcgtaatagcgataattagattgagatcgctccgcttttaagatacctagattcgtataataatcaatcgttcgtttcgacacgtgagccatgagagccaactgtccgattcgatacaccttcccaacgatcttccccccttgtttatattacatacatcatacaacacataaactgtacagtcaaacgtgacggtttattattcacaatttatacaaaattccaatctcctcctatgatgattcaatacgagtaatctacacttatacaataaaattactaaactactacctaatcactacattgtctgccacttttaacctttcttatttaaaagcatatcctactaataatgattgcttgtataggagggaattaatatgaaaaagacaatcatttctcatttttataatgaagaatacctacttccatggtggcttatgcatcacacgaaaatattcgatcacggcattttaattaatagagggtctacagatcgttccgtagagatttgtaaactattagcaccccactgggaggtacgaaattcaagatttcttgagtttgatccaactaatactgatattgaagtgatggaaattgaaagagaagtttcaggttggaaaatcgttttaaatactactgaattcttttgttgtaataatactgaagaatttttttcatctcttcatacactaggccaaaacatgtatgcgattagaatgattttaatgatagataatcataattataattattcaaagcctagatattctatccccttagtagaacagcgataccacggtgtcttcccttataacccaaatctcggatgtgcttggagatttattcacaatcatctagacggtgcatatttacctggtagacatcattcgcggcacggatatataatttatgactatccttcatttattttaaaattttattttagcccttggaatgaacaatcaaaggcaagaaaattacaaattacacctaccctttcaaaaaggggtgttcaaatgggacttcaaacacattacggtcaatctcctgaagtactggacatacgttttttagagcttagtaacctaacacaagacctccgtcataaccctgaatatcaagaattatttccaaaattcaaaccgtaatattttctgcatcgtcatcacctcaaacattttcattcacttaatcaaaaacaatctcatttgcataaaacatgaatactgtataaataataaatttttattttaggaggaaaaaatgaaagctgttattcttgctggtgggtacggtacaagaattggggaagaaacacatttaaaaccgaaacctatgattgaaattggaacaaaacccattctatggcacattatgagtttgtatagtcattacggaattactgagtttattatttgcttaggctataaaggatatgcaattaaagagttctttctaaattacaacttacacatgtctgatttcacaatacagttaaacgataatacaattactagccattctcatcgtgtagaaccatggaaagttacactaatcgatactggtgtaaataccgaaacgggtggccgagtgaaaaagattcaaaattatgtcggagacgaacctttctgcctcacttatggtgatggattaagtaatgtaaatataaaagaacttattacattccataaaaaacatggaaaaatggctactgttactgccgtacaacctcctggtagattcggttctctcatattagataaacagtctgtaacatcttttcaagaaaaaccattaggtgatggcggatgggttaatggtggatttttcgttttaaatcctgaagttttcaattacattagtggagataagtctgtttttgaaacagactctttagttcagttagtaaataaaaatgaattggccgcatatcaacattctggtttttggcatccgatggatacattgcgcgataaaaataaattagtcgagctatgggaaagtaataacgctccgtggaaggtttggtaatatggcttcatcatctttttggaataagaaaaaagtatttattacgggacatactggatttaaaggctcctggctcacccttttcttaagttctttaggtgcagaagtagtaggcttttcttctcatcccccatccattcctaacatttttgaacaaggtaacgtagcaaaagagtgcacgacaatgaaaggcaatattacagattaccattctttatttcatgccatgaagcagcataaacctgacataatatttcatttagcagctcagccaatcgtaaccgcttcatacaaaaaccctatcgatacattcaaaacgaatgttttaggtactgttcacgtgctagaagcagcaaagtccgtcgaaagcgtacgtgccattattaatgtgacaagcgataaatgttatgagaatgacggtagtggcgaccgatcgttcgtggaaaatgaccgactaggaggtttcgacccttatagcgctagtaaagcttgcgctgaaatattggcaacatcctatcaaaaatcattcttccgcactaatacccagaaactcgcctcagtcagagctggtaacgtcatcggcggtggtgattgggcagaagatcgattattccctgatatcattcgggcatatttgcacaatcatactttgtgtattcgaaacaaatatgccgtccgtccgtggcaacatgttttagatcctctacatggctatatccttttagctgagaaactttggaatgatgctaaatatgcagaagcgtggaatttcggcccaatgaatgaacctaacagaaccgttcatgatgtcattgaatctgtaataaaattatggaataacccactaacaatcatttcctcctctacaaatactccttatgaatcacctgttttaacactcgatagtacaaaagcagtaaacaaactcagctggactcctaagttatcaacagatgattctatcgcttggactgttgattggtacaaaaaatatgcatctggtgaaaatatagaatctttcacatgacaacaaatcgatgcattcaaaaatttataaaggggctataaaatggaacagaaaaaatgccgtttttgccactcattactaaccaacacttttttagatttgggcgtttcccctctcgctaattcatttgtagctcctgaaagctcatataaaatggaacctttttatccgctgcacacatttgtttgtcactcttgtttactcgtacagctagatgaatttgaatccccgcaaaatatttttcataactatttatacttcagctcttactcctcaagttggctactacacgctaaacaatatgtagaaatggcgattaagcgtttcaacttaacgaaacattcaaaagtgattgaaatcgcaagtaacgatgggtacttattacaatactttaaaaaagaaaatatcgagacattgggaattgaacccgcgaaaaacgtagcagaaattgctatcaaaaaaggaattcctactcatgtgaattttttcagtaatgacttagcaaaaaaattgccacaagctgatttaatcgtcgcaaataacgtattagcacatgttccaaacttgcatgattttgttgctggtttaaaaacactattaaaacgtgatggcacgataacaatcgaattcccgcacttattaaaccttatatcctttaaccaatttgataccatctaccatgaacacttctcctacttctcacttataagccttcaaaaaattttagctcatcatcatttacaaattgttgatgtagaagagctttcaacacatggtggttcattacgtatttttgtaaaccatctaagttcccaatccactatccattccaacgttacaaacttactccaaaaagaagtcaatcacggactcgatacattagattgctatctccttttttctaaacgagtggaacaattgaaaataaatattttaaagttttttatcaaagcaaaagctttaaacaaacaaatcatcggctacggcgctccggctaaaggaaacaccctgttgaattattgcggaataggtaaagaatttttagcgtatacagtagataaaaatcctcacaaacaaaatctccttttaccaggaactcgtattccaataaaatctccagcagaaattaaacgtacaaaaccggattacattctcatacttccttggaatttgaaagacgaaattataaaagaatgctctttcattcgtgaatggggcggtaaatttttagtgacagttccagaagttgaggtgattgagccatgaagaaagttgttgtaacaggtggtagtggctggataggtaaatatgttgtacattcacttatacaaaagggatacgaagtgcacgccacgtataataaaaataaaccctctcacctcccttgccactggcataaagtaaacttgctccgcaatgacgaagtaaaacaattcatttacgacgttcagcctagccatctcattcaccttgcttgggaagcagtaccaccagcatgctatgtatctattaataattactattggctaaagtctagtatttcattgattcaacactttacaacatgcggcggaaagcgtgttgtcgttgcaggtactggcgcagaatacgaatggtttaacggcgtattatttgaagattcaccgctcctttcctataaaaccccgtattctttatgtaaaaatgcactgcactcctggctagaaacgtatgcacaacaaacaggcctcagcatgtgttggggccgcatttttcatatgtatggacctcacgaacaaggtaatcggctcgtttctaacattatcacttccttattaaaaaacgaggaagcactatgtacacatggaaaacaatcgagagatttcctccatgtgagtgacgtcgctgacgctctcgtaacaatattagaacacggcgttacaggcaccatcaatatcgcttctggtcaatctgtacaaattaaagagttagcttctatcattgctaaaaagataggaaaagaacatttaattaaactaggtgcaatccctttctctaaagatgaacctttatttgtcggggttaatgtaaaacgtttaaaaactgaagtaaactggaaaccaacatacgatctaaatacaggaatagaagaaacaattttatggtggaaatcatttatacaaaaacataacgatatgcatcattaaaacgtaaatccttcgttcctctcgctaattccttataccattcttctaatctttccggcgtaacaatatgatgcgtacccattcctccatgcttactagcttcagaaagagtcggaccaatttgtaactttctctttctcatcgcatcattccacggactaaacccaaaccataatatacaggcaagaggtggataaatcatcgattcatgcgcagataaatgtcttccaaccgtataacttccatgctcatgattatgaataaatcttccccttctccatagtctccactcctctggtaaataaccatgaaatcgctgtttcattaaaggtattccaaagttaagttccggataattatagttaggatcatcgaccataataagcccttctagccaatacatcctacctcccaattcatctagtgatttccaaaactgatttttatcttgcatgcaaagaaactcagtcgtatttaaaatcattttccatccttgtacttcttgttctatcctcatcacttcatgatctgtcgcatatgcatcaaactctggatttacagaatctcgcacttcccaatgcggtgcgaattttttacaaatctcaacggaacgatctgttgaacctttattaattaaaataccatgatcaaaaagtttcgtatgatgcataagccaccatggcaataaatattcttcattgtaaaaatgcgaaataacggttgtagttataataatctcctcctctttctctattaatctactttttatcctacaaccaatatactcataagcaaaaatatgtttcctaattattgatcaaatattattattaatatttttgtaagttttcctttggtacccagcccttctcaccatctcttccttcgccccaaacccatccattgaattcttctaatccaatcactctttctccaatactcacatttaattctttcgcagtatattgttttataataattcctgttccattcatatctttttttataatttgctccggaacccatcctttccggtcatatttctcttcgtgacaaaacatccagttttcccagttttccggaccagcgtaactctctatcattttcactacatccccctcttctaagcgaattggattaggataattgctaacatgtgattttataacgatatatttcataacaacctccaataatcagaaaattaagttataatatcattataacttaaagaggaggaatgcacgcatgtactacaacacttcattcgaaaacgatcaacctgtaggccgtctataaactaagacgggcaatcatataacacatacactacgcctcgtcttagggaactcataataccctaaaaatagacggaggtactttacatgaaacaaacaattttaggagctatatgtttatcactagcagcaagtatatggggtggtatgtatgttgttagcaaatacgtactcgattttatcccaccactaaccctcgtttggctacgctttatcattgcttttgttgttttgtatggcattttgaaactagctgagaaaaagcaaaagaaaaaagtaaccattcgcaaaaaagattggctcctattcgcttggattggatttatcggctatttcatttcgatcacatgccaatttatcggaacaaaattatccgacgctcatacaggctcgttagttacatcagctacacctgcatttatggttatatttgcagcgctcattttgaaagaaaaactaaccgctcgtagacttttatctactataatagcgacaatcggcgtcattatcgtaatcgggtgggatattgaaattggctcctattttattggaacaatcattttagttggagccgctattacgtgggctttactatctatttatgtaaagatcgcttcaatccaattctcatccttagttattacaacgtatgccatattcttttcactcttttttattacaccctttatgatatgggaactacaaacatcctctatcggaacagtaaatacgtacgtaatattaggcgtattatacttaggtattgtctcaacagcaggtgcctttttcctttggaataaaggattagaattaatagatgcaagcatcggttccttatttttcttcttccaacctattgttggatcattacttggctggctcttattaaatgagacattaaatagtaacttttttattggcggtattcttattatatgtagcgttttaattactacttttgaaaagaaataaaaagcaggcagagattcttagtctctgcctgttcgcattattggatcttgatcgtgaaaaccaatacaaatcggtatattactttgcacttcactacgtacacttataaaactacacagcgttttagcaattaaatataaagttacaccgactgctttttcacttgtgtcaaagccatttccattatacatatctgctaattctacagaccccggcccctcaatattatatgtccattcagatgcccaatcatcgtcctcttcttcaagtggaatatattcctcacaaatataaaactgactatcccattcgttatcaaggtcatactcaaaataaatcgcttttgattcttcattagtagccatttctacagctgcatccaaacctactcgaatacttttcttatatgactctaaatcaattgctttaattcgttctgcatattctgcagacgctaacatgctacaaatttcaaaatacttcgcttctatttgctctactgctaacgaaaagacatcctcttgcatctcttctaaatactgaaatatatccacactaaacactcctcactctttacgcactccaatgcgatggacgggataacattttcggtaatttcgtatgcttatcccctttcgctgcgttaatttgaacttgcgtcagaaaaatactatttgtaaaatcagccccgcgaatatctgcatctcttaaatctgctccgataagatctgctcctcttaaatttgctccatttaagttagccgcaattaagtaagcaccccttaaatttgcaccttgtaaatttttctttttcaaatttgctcccataagatctgctccgcggtgaatgattcgtttcttacgtgcagtattcatttccttccatactaattcgctcgtttctaaaagaagaatgttcacctctgccctatgcattggaacatttattttcattaactcatctggatttaaattcgaaagtcgctctgtctcctcaattgcggtctccagctctttatgaattggctgtgttgcctttaaaagaatcgcttcatttaaataccaaagcatttcatgaagttgatgtataaccggaaaagcatcgtacatttttcttgcatgctttgcatctttccgccaatcaatccctttaaacgtaccctgagaaatcttctgcccagcaccgaaacactcaaatactgtacaacctttataaccttttcctctaagatttttatgtatactacatttaaaatctgattgtaagttagaacatggtttaccaccatctttattcactgcaaaatctaccgatgctgcgaacggtaatgcaacgcaacatagaccgaagcatttttcgcagtttgcttttaaatgatcattatgattagtcaaaatctataccccctgttgtcttttgactatttcataatattccaactgtaataaataatcaattttaaaataaaccggcatctttcgttccaattcataactttatcattcgatttcctttcaattgaaaaggactatttctatttaatgaattataattaaattataaattttctaactaaaaggagacttattatggcactagaaatgaaaacaaactgtcaaatttgcaatcaatcgctcgaacaagattctgaagcatacatttgtgtatatgaatgtacattttgcgcaccatgtacagaagaaagacaaaacgtttgtccaaactgcggcggcgaattagtacgtaggccgaaaaagaaacaataaaaagcaaagcgatatcgctttgctttttattgttttctgagtatatgaaattatatcgaacacaacttaaacatttaaaaacttcacacaaacaggctctggcacagcaacatcagattgtaaaagtgttaactttcctgtagattcatctcttgaaaatagcacaagattatgtgacttttcatttgtagcaacaagaaacttttcagtaggatctaatacaaagtctcttggccaatttccttctgtagatgtatgttccacaaatgcaagctcacctgagttttgatctacgctataaacagcgatactattatgaccacgattacctgcatatacaaagcggccgtcagaagaaatatggatagcactgccttgactattttcatcaaattgttctggaagagtagaaatatactgtaattctgtaaaggatccttcttccgagttatatgttagcgcaataacctctgaactaagctccgtcattacataagcgtattttccatttggatgaaaagcaatgtgtcttggtccacttcccggattcacagacaggctattcacttctattaatgtactatcttttacttcatacgtaattattttatctatccctaaatcaacgcccactacatatttttcatcaggagtgtaccccgcgtaatgtgcatgtggtttttcttgtctttctttattcggacctgaaccttcatgtgccataatagatgaagcaggatttacagttccattttcttcatttatttcaaaagactcaatcgttcctttatggtaatttgctgtaactactgtatgatttccactatcaacactaatatgacaaggagaagccccttctactacttgtctatttttcgcttttagttctccagtatgactatcaatggaataagcagctacaccgccagattcgccttccttaacaacagaatagagatattcattatttcggttaatcgttacatatgtagggttatccagcttagcagtaagtgttacattaccaattttttttgcttccgtgtctaaaataaacttatatattccttcgctattttctttcgtgtaagtcccaacatatccgataaactctttgttatccttcattttcataaccctctctccctatatttttcgttcatcatactttttaaaatattttatgttgaaagagtatcctaaaaaatcggagtacctctttatacgttaccatattttcttggtaaatagcttttaaacccactttttttgatacgctgctatactttcatattcttcttccaattgacgggacaagcggatatagattggcgttaaatctttatatttttccacactttccatgtttggctcatgatgaaaatctgcacctaccatttcagaaactacggataatgtatctatttcacctaaactatataaaccgaggattgcagctcctaagcaagagctttcgaaactttccggaacatatacgtcttgatggaaaatatccgccatcatctgtctccaaagttccgaccttgcaaaaccgcctgtcgcttgaatttttttcggttcgccaattagttcttttaaagcgagaagaactgtatataagttataaattactccttctaaaacagcacgtatcagatgttctttcttatgatgcaatccgagtccaaagaaagatcctcgcgcatttgcattccataaaggagccctttcccccgctaaatacgggtgaaataataaaccgtcagatcccggattcacttttgctgctatttcagtaagcacctcatatggatcttttcctaagcgctttgcaagttcaatctctgaagtgcccaattggtcacgagcccatctgaaaatcataccgccgttattaactggtccaccgattacccaatggtcttcagttaacgcataacaaaaaattctaccttttggatctgttacaggacgatttgttacagcacgtatcgcaccgcttgtaccaattgtaacagccacaacgccaggatctattgcatttacacctaaattagatagtactccatcactcgctcctactacaaaaggcgtagaaacaagtacattcatctctttggcaaactcttcatctaatcctgttaaactgtgcgttgttggaacaagctttgaaagcttttcatctgtaattcctgctacatgtaaagcctcttcatcccactttaaagattttaaattgaacattcctgtcgctgatgctatagaataatcaattacatattctttatataacttgtaaaaaacatattctttaatagaaatgaatttataactttttgcgaataactctgcttgctcattctgtagccaaactaatttcgaaagtggtgacatcggatgaattggtgtcccagtacgaagataaatttcatgaccattcatatcattctttattttctccgcccagcttgcacttctattatctgcccaagtgatacatctcgttaacggctttcccttttcatctacagcaatgatactatgcattgccgaactaaaagagacacaaagaatatcattcggctgtacactacttattcgtacagtttctttaatcgtatttattactgcatgaaagatttcttctgggtcttgttctgctgtttcaggtgtaggagaatataaaggatattcaattccatgactagcaataacagatccatcagtagaaaatagaactgattttgtactagttgtcccaatatctacaccaatcatatattttgagctcaccatctcttcctcctaacaaaaatccctacagtgtcctaatcatataagaaccataaaaatatatttattttatctattcataacgttatgtgctaaagttgtctctctcaattcatataaaaatatccttattttaaccaaacatatcgagtagtaaaacgcctccaaaagcgataaatgaaagtaacgtttctaatactgtccatgttttaaatgtttctttcactgttaagcctaggtattcttttaccatccagaacccagcatcgtttacgtgagaaaacattaacgctcctgcacctgttgcaataacgagtaactctaagttcacacctatcgtattttcaacgattggcgaaacgatacccgctgctgttgttaaagcgactgtcgctgaccctgtcgcaattcgaattaatcctgctactataaatgctaatacaattggagatagagctaaatgctcagacatttgagcaatagcattccctacaccactatcgataagaatttgcttaaatccgccaccagcaccaataatcgcaacaattgaaccgattggtaataagctatcttctgttaccttcttaatagcctttttatcgataccttgacgaaatccaagaaaataaaacgctgcaaaacatgcaatcaataacgcaatgataggactaccgattaatgtgacaatcttcatcaaagtagtagacagtggaacatacggagccgctgcagctaaaaccattaacataactggtaacaatataactaaaaatgaaactcctattcctggtaatttcgttgattttgtatttacacgaatcaattctggctcattttcaggaattacacgtttgtgaatccatttagcgaatataggacctgcaataatcgctgcaaaaaatgtaataatgagtgaatacaatagtaccttcccaaggttcgctttataaataccaattgcaactatggcccctggatgcggaggaacaaggccgtgtacgacagatagcccagcaattgctggtaatgctatcaataaaatattttgtttcgttgttttatgaattgaaattactaacggcagtaatattaaaatgcctacttcaaaaaacaccgggattccaataataaaacctgcaattaacatcgcccatggtaagttttttatcccaaaggatttaataaagaactctgccacttgcattccagcacctgactctgccatcattttccctaaaattgtacctaatactaaaatacctactaaatgcccgagaacactgccgactcccgtttcataagcactcactattttatccattggcatcccagacataattgctaaaaacaaacttgcaatcgttaaactaataaatgcatgccatctccaccacgatacccctaaaataacaattacgattgataataatgtaatcattaaaaggtacatattcatacgcagttccacccctttatgtaaaccctttcaaaattgctatacaattaagagaacctatatagttctttcatgagtaagaatttatatatcgatatacaaatcatcttcacaaaataataatttatacaaaaagaatctcccttatcagagatacatgttaactcacctctctgataaggggatttctcttccataattataatgttattgtgataaacgcttcgcgcgatcaattttcccttttttaaaagtgaatgacactttcttctcttgctgttttcacgtagtaagactacaaactcagtatccactttaaacgatgaagttacttaggatttgtcttctcatgaaaaacaactttcggaaagcaccttcactttcataacattataatttaggcgctttcgcccaatcagcagcaaatttctcaataccttggtctgttaatgggtgcatagcaagttgttcaattactttataagggattgttgcaatgtgagcacctgccatcgctacacgagttacatgatctggatgtctaacagaagccgcaataatttgtgtatctagttgatgaacatcgaataattcagcaattttagcaactaatagtacaccatcttcagaaatatcatctaagcgacctaaaaatggagaaacgtacgttgcacctgctcgagcagctaaaagtgcttggttcaccgtgaaaataagtgtaacattcgttttcacacctttttcagtaaggtagcgacaagcttctaatcctgctaacgtcatcggaagtttaattgtaactttttcatcgccaccgttaattttaatcagttcttctgcttgggcgatcatctcttcagctgtaacagcatctggcgttacttctgccgaaacagattcaactttaggaactgcctgacaaatttctgcaatacggtcttcaaatttaatgccctcttttgctactaaagaaggattcgttgtaacaccagctaaaactccaagtttatatgctttttttatatcctcaagatttgcagtatcaataaaaaatttcatgattaattccctccagtttttaaacgttgatgagttacatgtttaatatgcttatcccgtaaaagcccgatttgtgtggaatgaagcccctacttattaaagtttcactttatttcttttctactgcatgtccgccaaattcattgcgcagagctgctacaacttttcctgtaaatgtatcattgtctaatgagcggtagcgcattaatagagacattgcgataacaggagttgctgtttgaaggtctaatgctgtttctactgtccattttccttcaccagaagaatgcataacacccttaatctcatccagttttgcatctttagaaaatgcattttctgttaattccattaaccaagaacgaatgactgaaccgttgttccatactcttgatactttttcataatcgtagtcaaattcacttttttctagaatctcaaatccttcaccaatagcagccatcataccgtattcaattccgttatgaaccatttttaagaagtgaccactaccagcttttccagcatataagaatccattttctacagcagtatcgcggaagataggttcaacgatgtcccaagcttcttgatctcctccgatcatgtaacaagcaccattacgagcgccttccattccaccagaagttcctgcatccataaagtgaatgccatctttctttaattgctcatatcggcggatagactctttataatgtgaattaccagcttcaattaaaatatctccttttgataaaagtggtgtaacctcatcaataacagaatcaacaacagcgtgtggtaccattacccaaagaattcttggtgattgtaatgactgaacaagttcacttaaactagatgtacctgttgccccgtactctttcatttcttctactgcgctcgtatttaaatcaaacgctactacttcatgtttatgatccattaaatttttccctaaatttaatcccattttacctaacccaattaatcctacttgcataatataattcctcctcaaatcatcttttattaaaaatccatatcactacaatctggaatacctttcagcactgaaatgttagtatgtacagaaaggtattcacagtcatagcttaagaattcaacacattttttgtaatttgaacaacattttctgtcgtaaatccaaatagattcatgacttcagctccagtacctgaagctccaaatgtttcaattgatattacttttccttcttgtcctacataacgttcccaaccgagagatacacccatctcaagagatactcgtttcgttatagaagacggaagaacggattctttatattcgttcgattggcgatcgaataactcccagctcggcattgcaacgatgcgaacagaaacttgatcttcttctaattttgctttcgcactagcagctaaggatacttcagaacctgtcgcaattaaaattacatccggattttcatttgtttgtgttaatacgtaagctcctttagagaaattctctatgttcgctttcgtttcattaaacaccggtaaattttgacgactcagtactaaaacgactggaccatccgtttgctgtaaagcatacgcccaagcacttgctgtttcatttgcatctgacgggcggataactgttaaaccaggaattgctcgaagagctgccaattgttcaattggttcatgcgttggaccatcttctcctacagcaatcgaatcatgtgtaaatacgtaagtaacaggtaacttttgcagtgcagccagtcgaatggacggacgaagataatcattaaatacaaagaatgtacttacgaaaggttttactcctccatgaagcgccaatccattcgctgcagcgcccattgcatgttcacgtacaccgaaatatatatttcgtccagcatatgattctactgcatatactgcttcaccttttatatctgtcatcgtagaatgagaaagatccgcacttccaccgaaaatagaaggaatcgatttcacataatgattaatagcttccccacttgcaacacgagtggaaatcgttttttcagtatcaaaagatagaatgtcttttgcttcaattaaaacctcacctgtaatcgctttttctaattcatctgccagtgtaggattcgcttctctgtataagttgaactgctcattccagtcattgtctttttcaatacctttttgttttagttcattaaaatgagcttttacttcttcaggtacaaagaaatcttcctcataatcccaaccatacacttgttttgtcgctgtcgcttcttctactccaagcggattaccatgtgctttgttcgttccagcaacttttggacttccataacctataatggttctaatttctataagagtaggttgatccgtattttctttcgctgattgaatagcttttgtaatcgcatcaacatcgtttccatcttcaactcttacatattgccaatgtacagattctgcccttttctgaatatcttcagagaaagcaatgcctaattcaccatcaagtgaaatttcatttgaatcatacagtacaattaacttgccaagtttcatatgtcctgccattgacatcgcttcataagcgacaccctccattaagtcaccatctccgactaaagcatacgtattgtgatctataatagagtgaccatccttattgaacttcgctgctaaatgagcttctgccattgccattcctacagcattagcaatcccttgtcctaacgggcctgtagtcgcttcaactccaggagtatgcccaaactcaggatgtccaggtgttttactatttaactttctgaaatttttcaagtcatcaattgaaacgtcatatccagctaaatgaagtaggctatataacagactagatccatgtcccgccgataaaacgaaacgatcacggttaaaccattctgggtgattaggattgtaatttaaatgattcgcccataatgcataagccattggtgctgctcccatcggaagacctggatgacctgagtttgccgcattaatagcatcaatcgataacgtacgaagtgtattcactgctaattgatttatgttttgtgtcatagtaatcgtccccctaaatgctttcattaaagaaagtacttatttttccgtctcttgatctaaccaccatttaaatccactttcttgtaacagttcattagacgcttctggaccatatgaaccagactcatattcatgaagcggtaataagttttcctcgaacgcttcaagaattggttgtacccattcccatgacaattcaacttctctccaatgtgcaaagaatgtagcgtctccactcacagcatcatgaatgagtctttcatacgcttcaggtactcccacatccgcttgctcacaagtaaagttaatacgcatcggttcaatttctccatttttcaatggatttttactgtttaactgtaatgaaacgttctcacctgggctaatttcaattattaataagttaggtgctgcatttggattattatcttgatattgctgttttaacgtatttttaaattcgattacaatacgagtagacttttctttcattcgtttgcctgttcgtatatagaagggaacgccagtccaaaatggattatcgatccacaggcgagcagcaacaaatgtgtctatgttagaagaaggatttactcctggctcctctttgtatgctacaacttgcccgccttttatctcacctgcagcgtattgtccgcgaatgatatggctttgaacgtcttcttttttcactttacgaagcgtttccattacctttcgcttttcctctcgaatttcacatgcattaaccttttccggcagattcatagcagtcatcattaatatttgtaacatatgattttgaaccatatctcgaatggcccctgcctggtcataatatcctgccctttcttcaaccccaactgtttcactcgctgtgatttgtacattcgctatatgttctttattccaaattgattggagaacaggatttgcaaattctaatgcttcaagattttgaatcatcggtttacctaaataatgatcgatacggtatatctcgtcttcttcaaacgtgcgactaagcttatcgttaagctcacgagcagatgtaaggtcgtgcccgaatggtttctcaatcatcagacgtttccatccatccgttttatcaagtccgctttccttaatatttaaagcaatggtctcgaaaaattcaggagcaacggaaagataaaacattctatttccttttatatgtaattcttcttccctttcacgaacgacttgtaataacctctcatagtcttccggcttactcacatctaatggacaatagcgaaaattatctaaaaaaccttccagttccggagtaccttcttctctatgacgggaaaacgtctctattgattcttttattctttcttgaaaatctacatgagatacttgacgtctcccaagcccgataacggatatttgctttggaagcttttgatctctatataaattatatagtgctgggtaaattttgcgtttcgctaagtcccctgtcgctccaaataaaacaaaggtcattgattccaagttcagtccccctcttgttgtataatcctcgtcgatatactaaaaatgaattgtacagaagcccctgtttttataaaaaaacaaagagttatcaaatcccaattctttttatacctttcgctttttaattgtccccaatattaatagtggcaattcaaagcatttctaccacaacttacttatttatagaatttaacgaaacattttatatctgattacttttagtaattaaataatcttatgtctaatatattaaccacataaattattatcgtcaataaaaatgtcttgaattacatacgatttatttcgtaatacttttctaagtgtattcctagttaccattcattttcaaagataatgatcgttataataaatatcatttttatcaaaatattcaattaatttagcgctaaactcacgagcagacgttacattataaccaaaaggcttctctataataagacgatttaatccttttgtagctcacaatccactttccttaatatttaaagcaatgacatcaaatacttctggtataacagataggtaaaacatgcggttttcaggaatgtttaattctgtttcacgcctctttacaagactcaacaaatcttgatagtcctctacattcgctgtatttaattgacaataacgaaatgtgctaataaacccttctactcctgattcgtcatcagtagatcttctagaaaatatagcaatggattgttctacctttgtttgaaattccacatctgacattacccttctgccaataccgataatcgaaatagactgcggtatattttaattactaaatagtttgtataaagcagggtaaattttgcgtttcgctaaatcccctgtcgctccgaataaagttaaactttaattagccctcaccaatctggcttttacgagcagcccaactcccacctaacttctttgctttcgctgaattttgaggcggggtcttactgcccggcaaatagcgggataaacataatgaataaatcatgctgcaaaaataacatctaccctttcttcaaaaagctttacagtagtttttagaagtacgttacattatttcatttcatgcactttccccttctctatataaaattctcactaacaaaattcaaaatattatacttatttttcgtactttgctatgctataaccacaaacaggaggtataaactatgaaagcacaaattatccattcttttggggattcatctgtatttcaattagaaaaagtttcaaaaccaaaacttttaccaggtcatgttctaatcgatgtaaaagcaacaagtgtaaatccaatcgatacaaaaatgcgtagtggggccgtttcagccgtcgctcctgagtttccagctatattacacggcgatgtagctggtattgttattgaagtaggagaaggtgtttcgaaattcaaatcaggggataaagtatacggatgtgccggaggttttaaagaaactggaggtgcacttgcagaatttatgcttgctgatgcacgattaattgctcacaaacctaacaatttaacaatggaagaagctgctgctctaccattagttgcaattacagcttgggaatctttatttgatcgtgcaaatattaaacctggtcaaaatgttctcattcatggagctactggtggcgtaggacacgtagccattcaactagctaaatgggcaggcgctaaagtttttacaacagcttctcagcaaaacaaaatggaaatagcccatcgtttaggagccgatatagctattaattataaagaagaatctgttcaagaatatgtacaaaaacatacgaacggaaacggatttgaagttatatttgatacagtaggcggcaagaatcttgatcattcttttgaagctgctgcggtcaatggaactgtcataactattgcagctcgttcaacccatgacctctctcctttacacgcaaaaggactctctctgcacgttacttttatggcattaaaaatattacatacagataagcgtaatgattgcggagaaatcttaacgaaaataacgcaaattgtagaagaaggaaaacttcgtccattgctagattctaaatcttttacgtttgatgaagttgcacaagcacatgaatatttggagtcaaataaagcaataggtaaaatagttttgaaaaacgtttggtaactttcactaaataatacaaataacaaatgtttgttgttggaaaataacagcgagatcgcttcgccttatctttttcttaagaggcgtgccacaaccttaaaagctttccatcctttacaacaagtaaaaaaataacagctgaattttgaagcggggtcttaccgcccggcaaatagcgggataacattcaaaaaccttgcagaaaaattctacaaggtttttgtctataaatacaaattaatcactatattaaaatgaaagagtttgtaattcatcacaataatattaaatatacgctgctttaaaggcttgttggacagcttgtacttctaatgagtctttaccatataagttcgttgctacacgaatacaagcttcttttaattctttaaaatcagaagtcatatttaattcatccgtatttgcataatagaaaatatcaaacattttatcttctccaatgccatgtacgtttactccattatggcttccaccactagcaatcaagtaagctactttattaataatgctagagttcgtgtgtacaccaccatgatcgtggtcagcatcaataggtaagttattataatgcctataatcctctggatatctagaagagatagatgatgggtttttcatatctctaaaaatacgacctgattgttctcccattgtccaattgaactttccgttattggcatacttttcaacggctactcctaaaatatcagataacgcttcattaattgcaccagcttctcctgcgtactcaagtccagactcatttcttgtaaccgcgtgtgtaaattcatgtcctgccacatcaaatgctctaacaattgggtctccgtatactagcatagcgccattactaaatgcattaaaccactgcttaggatttcctttattcgtaccatttgtgttccaaccatgaacgacagaaattactttttgtccgttattatcaaagctgttacggccatatttttcttgataaaaatcatatactttcgttgctaaataatgggcactaactgctttaggatctgtaaaatttgtagaattacttgttactaaatcatcgagataaccccatacatttcttctataattattataatctttataattagcagtatatgtttcaattcccttaccacgagaataatctgcaagcatgtacgttccatcacttctttgtgtaattccaaacgtacgattaatacctaagtcatcttttcctgtacctgttaattttgaaggatctgttgatttatttgatgtcgcagattggacaatactactctctacttgtatacccaatttttgaacgagttcttttaatagattaccaccaaaagcatcaattaatactgtaccggatacatattcaggtgtagatgcactaaaagtaatttgatatgcgtttgtagctttatttgtattttcatctacatataccacttgtttaatttctggttcttcgataaatgtgagatcatttccatagatgttgaaaagctgtttctttgcatcctcttctgatagagtaataggttgtttcaaatcttcctgttgttgtaaattttgggcactatctcccgaaacgctcgtaagtacaccatcatcattaatatgtgctgttagttgatatccgtatacatcacgtccttcatacgtttgttgaagacgtaccaatgtagtaccatcataagatttacgactttgcgtaacattataattaactttggattccgtattaacttgctttgatgataatgcttgttctgtttttccttttagtgcatcctttgctacattttctgccgaattttgagaaggtgctgttaaattacctgttcggaacgtatcttcctttgtttccacttttaaatcttctgtttccgcatgtactcctccataaggcataatcgccgataacaccactcctgtagttaaacctacctttacgaaattattcatatttttacccctttataatcgtattattaaattaaataaatgtattttagaattttaagcatagataaaaaattttaactatagccaatcgtttttacatacctctacatacataggttaatagattggtttgctacttttttagattcaattcatttctcaaaaattattcattatataagctatctttatatttattcatatacgttattttttgtggttctgataacatatttattgccatccacacattctttttcatttctaatttttgcattggtatctcttttaaaaactgattacctataatcgcttccatttcttcatcaattctttgtataagattttcttctggattattttgcaaagaagtatttttcaatccccattttgttattataaattcattcattttattcataggattaataatagtagctttactagttaatcgtttttttatttcatcatgatagattttaattctatatccctcttttagtggaatgatatcttttacaattgttacatttgttccttccatttccttcgtataaattttttcacctttttcattaaagacctctatcgatgcatatttttcacctgcataatagctatgaggcgttttagtagtaatcgtaaaaatagctcgattttgctctaagtctgtatttaatacggcaaactggtcatctcctaatcctaggaattgaatcgtttcatttaccaacttactcactttcatttcgttaatatcaatctttagactattatctttttcttttacataggcataatacgaactgaaatggtacatactattcgttttcccacctgaaatttcaaccgtatacactccatttggtacgtcttgtaaattgatatctgttgtttcaattgttttctcttgaataactgtattcccttcttttaatttaatttttcctccttttaatgtatctatttcatttgtatttaaatggatatgcaaattcccttttagcccaagtggagcaatttgctgattcgtaactatttcgaagttggagtttatcggaatatcaggatcaactatagctcttgctttcgctaattgtgattcaggcactatataagctaaagaagtaacagccggaaaacctttcgccctattcatctctatttgtttatgattaagcttaaagccccatctttcaaaaacaggtgtaaaatcaacttgtccattctcactataatactgattcattaaatctggtaaagaatggtcaccttttttgaaagcagcattgctagctagttttcgataaccttgatacatttttgcaaatgcttcatcgccagctttttgtttcgccatcgttaaaagaataagtttttgtcgtaaatctaaatcatcataatttttattttctttcattaaagcattatataaattccgttctacctgttcctttttcccgaaattaaacaaccaaccaacttgatctgcttttttgccgtatttactatattgatattgaacaccaaatagattattagaaacttctcctgtaaatattccttgattatcaaaaccagcttggtatccatgagcgatttcatgtaaagttccccaacttagtttatctaaccacatctttgtactatctgtactattcgctgtccaatttgtgccataataggcaccgccagcaccagatatatctgcttttaagaaataacgattttgactttttttattttcaaacgttgagccatctaaaccaataattgaatcatacatcacaaaaatatcttcataatacgcaattaactcatccaatgattgaaaatcttttaaagatcttactaactctttatcttttttaggtacaaataattgaaaactctccccttgaagtaacgcatactctccatcaaattgatcccatgtactaaaaaattgagatacacttccttgttgtttataaatgggaagggggttagtagcactttcattccctacttggtactcaagtacagcgtgctcttcaccatacggagtatctatgaaaggaactaaagacgtatcaccttggatagtaacccattcatttcctacttgtatggatttttcattttttgagtcattagacaataaacgtaatgttaatttgtctttaaaattaggatttgtttgtcttacctttaatggtgtatttctcttcaaaataaatcctaaatcttgtcggtcatgatatttccccttacttatgcccgcctgaaatatccaagtaggctcttctaaactagtaattttttttgcatttattcgttcatcagcatgtaagtgtatatttcctatgaggaaaaacattgtatacattaggcctataacaagtaaccttttcatttgcatatctccttctctatttttttatatacaaaatacaataaagccctccttcttcacttataattgtcgtcaataagttacttatcagtgtaattattatagttacattaactcgtgattatcaatcattaaatgtatgtaattttgcatatatgaatattttgtgataaattccaaaatatcgtataattatcaatattttttcagacattattcaataaaaaaaacacgaagactcttaagtcttcatgttttttatacatgttattacacttgtgattgaattaattactaaaatctttttaatcgtaaaaaatcaattatttttaggctgatagccgtacctaatcttttacaatttacttattctttttgttctgtaatattaaattttgaaaccaattccgttaattcttccaccttttctttcattttgttggattggattgatatttgttcaattgatacggcctgtgattgaattgaatttacagtttgaagagtctcctttttcacatccgttgcagtttcagaaactagcgaaagagaagcatttacttcttctgtaccagcagacatctcttctgtcgctgcggatacttcttgaatttgacctgtaatcttatcaatatctctcataatagacaagaaggtttgattcgctttgtaagcagcttcttttccttctactgccttttgttgtcctttttgcatgacattaactgtatcttgggtatctttttgaatggattttattaaatgattaacttcttttgcagattctttagattgctcagccaagtctcgaacttctgcggcaaccactgcaaatcctttcccattctctccagcacgtgccgcttcaatagcggcatttaaggcaagaagattcgtttgttcggcaatattagtaattgcagcgagagctgtatcaatctgttgtgtacgtgtaacaagtttatttattacttttgatgtttcctcgacaacatcatgcacactattcatttgaagaatagagtgatttatcacttcactaccgatatttattcgttctgtagtcgttactgctacctcagcgactactgctgaagattcagctacagtttgcaccccggttgtaatttcttccattgaggatgagctctcctgaatactagttacctgtccttctatttttgtttttacttctaaaacagtctgtacaacctcatttgaaatactagacgcttgatttgtatcttgtaatacactctccgtagtaaaaataacctcttgtgttgtcatcttaacattcgcaattaattgttgaaggttatctaacatactattaaaagactgaacaatatgccctaattcattatttgctttataaggagtacgtgttgttaaatctccagctgctactttttccatatcattttgtagtaatgcaagtggttttcggatagttaatttaataacatatccaattaatataattattaaaattgctaaaatcgaaatactaacaaacattatcattgtattttgagcactattattattttccttctgtaaaagctctgcattattactattatataaaatcaattcacgaattgattttattgatttttgcatattaggttcaatctcttttagataatatgcatatgcttcctcattattagacttccctaattcttgtgctttcttcatttgagtccttaattcattaaatgtttcatgaaacgtgttatataattctttttctttagtagaaataagtttagcctcaaactgctttaaaagatgatcattttccttacgaatcccatccatttctcttattaattcgttcattcttttttcatcttttgataacattatttccataaagttcatattaacgtgataaaaattagattctacaattccaatccactcaattggcagtaaattatcctcatacatattagaggaagtacttttccctctttctaacccccaaaaccctattagggataatactatacatgcaatacttgatatagttattaatatgtttagttttgtaccaatcttactgtttcttaataattccaattcactttctccattctaatatatagtttaagtaatgtattttataccaagaatccaaaaattacgatgtttattttgtaatatgtaattttgcatatcgtccactactgattcaaaataacctaacattgtaattttcgttttccaaaaattcatgatcatgaacacatctcattaattcttgaacttcttacccaaaatatccgcatatactgtggcaccagggaaaaccatcactggtatgatatataaattacgcttccatacaagactagcttaaaaatatttttcttattgctcatttttctattccccctctattagaagtactcctagcacatcacactaataaaaacgataatattaaaaaataaggaaagacataatacgtatgtctttcctctaaaattgtaatactcaatatgctcttggctctatttgattttccatttaaatcctcacatatctttctttataatatctcctaactccatccaatttgtaatacgcgggatattgagatattgattgtaagaagtagtttttgcatatacatttatcggttttcctattaacgtttctaaaacagccggcttatcatcaaagaaatagtttaattttatttcttgtataaagtgtattttttcttcatccttcattccatagaaaaagcgatcttcatgtaccggaaatcctttttctattaaccatttttttgtttgctctccatgctctttaggtcgcgccgttatatagtaaatttcatgtccctgtctttctaattcttgcaatgtctctacagcatacggaaacggtgaacaagaagtataataaatctcatccagcaaactattccacatatgaccgccttcctcggaagtcatgccaaatgcttcatgaatttcaattgtttttaaagaatggaatacatccaaccctacttttttgtttaatttcttattatataaatgaaaagcatgctgccttaaatcaattagtgtatcatcgatatcaaatccaaacttcactcttcatcgctcctttctgcaatccatttatcggaacatataagtagtttttattccccttattgctcatctttccgatatgctggatagccaataaatctataatcttttccaatctgggtaaatgatatatccttaaattcaattgcatctttcattttagtaataccagtcccctctacaaaactaggcgccaatctacctccaataattttaggtgcgaaatataaaataattttatccattagtttattttcaataaacgaagcatttacttctccaccaccttcaataagcagggaggaaactcctttttgtcctaaaacatcaagcatttcatgtaagtttatatgcttttctccgctagtaacaaatactttaactcctgcattttctaatgctttctttttttcctctgcatgattacttgttgtaaatatccaggtaggagcttctctatctgtaacaacgttagcttccatcggtatgcgtaatgtcgagtccaatattactcgaattggatttcggccatttggaatacgcgttgtcaatgatggattatccttttgaacagtattcgctcctactaaaatagccgcattttcgtttcgtatttggtgtacttcttgtcttgcttctgtagatgtaatccacttactatccgataaagacgtagcgattttcccatctaatgtaactcctgatttaatcgttacaaatgggcgctttgtcaaaatatatttattaaagacttcattcatttttttagattcttcttcacacactcctacaagtacttcaatacctgcatcttgtagaattttaattccacgtccagaaacaagcgggttgggatcaagtgtagcaactactaccttcttaattcctgcttgtacaattgcttcagcacaaggccctgttctaccatgatgagaacaaggttcaagagttacataaattgtaccaccacgtgcctgttctccagccatacgtatcgcatgtatttcggcatgtggttctccggccttcatatgtgctccgacccctacaattcgattatcatttacaattacagatccaaccaatggatttggagtcgtttgtcccttcatagccttggcattttctagtgctagcttcatatacaattcatgctcaagcatgtaagtgtcccccttcaaaatgtccagaacgctgaatcttcgtttgcaaatatttctcattaaactctgagacatcaccccataacggttcacgactcgtaacatttaatccagctttttgtaacgcttctaattttttcggattatttgtaataagttttacaggttttgagcgtagcgcttttaatacttcaattgtatcatcatagtttcgaacatcatcttcaaaacctaggttcagattagcttctactgtatctaacccattttcttgcaagaggtacgtcatagctttactaaacaagccaattcctcttccttcatgattcgctaagtaaaataaagcacctgaaccatgttctgtaatcatttgtaaagactgctttaattggaatccacagtcacaacgtttactaccaaagatatcaccggtgtgacaaatactatgcatacgaattagggcatcttcagaattctcaaaatcaccatatacaagtacactagattgctgcatatcagctaaattaatagatgagagtttttcgataattccttctacactatttgtaacctcactacattgtaaccaagaataccattgaaaaactttagtctccccatataaattaattggcaatttgataggacctactaaataaatatcctttccatcttgatgtataaattgaattttatcttctaacatatgaattgtatctgttgtaaccattaggtacctcctagtatagagaatctctaaaattctcttccattgttatattttttattgtttaacttacacaacgtaagtgtttttacagatgctattcttttttctctcagcttatatgcaatatgtatcattacaactttggccatttaaagaaaagagttttagttacataaaacaacttagttactttatgtaagtgagtatacattcgtaatcaatttacgtcaagtaattaattataaaaacatttgttactaatagtaagatgttatataatttattttaggaggtgaaggaaaatgaatgattctacattatgccctcgctttgaaaaaggaatgaaattttttagtcaacgatggacagcactaattatttaccaacttttttctggatctcagcgcttttgtacacttgaatcttctcttcctgttagcggaagattactttcagaaagattgaaagaattagaactagaaggaattgtcgaacgtaaagtctttcctgagacaccagttcgtatagaatattctttaactcaaaaaggatttgctttagaagctattattcgcggaatagaagaatggtcacaggaatggatagaacttgaggaataacataaaagctttttcgtatatagttttaagtaatcaaattacagatacctattattaaaacgctaatttttcaagcatttatgaaaagctagcgttttttaataaataaaatgtaagaaataaagcaaggtgatcaaaacgatcaccttgttcccttacagattaaaatagtgttttaaaatcttttattcatacatactcgattaataaaaaaaacgaataagcttttttattaataaacagttttatttttacaatacagttagcttcccctgctatttgcggacagtaagaccaccactgattaaatttctattttattacattcgaatattacttatgaaatttcacacgctcttcaagtggttggaattctttttcacctggtgcagctgttggattaccaaatggcatttgtgcaattagtttccaattagcagggactttccattcttgttttacctcatcgtcaattaatggattataatgttgtaatgatgcccctaatccctctgcttctaaacctgtccacacgactaattggtgcatacctgatgcttggtgtgaccaaattgggaagttttcagcatatgcagcaaacttttcttgaagcgatttaacgatagcctcatcttcaaagaataatactgttccataaccagctttaaaagaatccattttttgttgcgttcctgaaaagtctccatctccaactacttttcttaatgtttcagtggtaatatcccataatttatcatgagcttcaccaaataatacaactaatcgtgcagtttgagaattgaaagcggatggagtatatttcacagcaaactccacgatttctttaattttttcatccgatacttgtacctctttattaatcccatagtaagtacgtctttctttcagtgcagtatagaaatcttttgtcataattccgttcctcctaagttttaatattcttcaaaatgatacatctcgaagatagtatgcgtttaaatgagttcatttttgaatcattgaacttcctagcacccattgccagtcattctaaatctaaacacactgcttccttcagttttcctaaaaaaagccttataacatcattcataaaatctaatcatcattcggtactattttacccattctctattcatgtatcctgcttgtttcatatttacacaaatatgaaatgtagctactttaatcaccaaatttcacattaatttagagcatcttcaattacagcaatttcgctcactcgaacaaaacgatgcaatttaaagaacattgcaaaattaagtgctacctgtaaaagaaccctcttagccgactataagaaaaaataataaaaagccaaaaacgaacaataatatgttcattcttggcttttacttaaccatcacatttatttttactattgcttcaaatgatttttaactgcccttattaccaattcgtgatcttcttctggtggtaatcctgaaactgttatcattccaataacccctacgttttttattctgataggaaaacatccaccaaacgcagcgtattctgaagtatctaaaagatatttttcattataggagaccccagttatttcactttgtatctgcatataatacgagctacgatcatgcagggaaacgactcgttttttacgctcaatccatttcgtattttcctcatttgtccctgtcatcttgaaatgaaataattgcacaccatttttcgttatatcaacagcaatcaatttcccctcttgctttgctgtttcaacgataaataaacctagttgcaaggcatcttcatttgtaaaagaggaaaattgaagtgtttcctcctcttttaaaatttgtttacttatttcattcaaatttgaagtactcatatctttgtcccccttactcactttatgccagattgctacttttaaaattatgcaatcctatcgtgcggtctttccatataactaataccgtaaagcgtattcatttcttcttggtgctattatgaattatatttaactcattaaaaatgtatgtcctctagtgctaaacatttcgtatagaagttttcttccgaatactacttacaaacataaaaaacagttgattgagcaaccggttcgctaaaagtttcatatgggatattcatttaaccaaaggaatgcttgttcataatcatcaaaaaattacactcaataaagcaaccttatgtacgaaaagagactatggaaaagatgaccttttgtcactcatttaaaaagggacaaactctccaaatggagaagcctgtcccaaaatcgctttattttattttgcactagaactaacaatcgtgaattagaataatgacttaatacttgctaagacagtaagtacacctacaataataacaaatacgttactcattttccctttgtatttagctagtactggaactttttgaatcgcatacatcggtaatagacataagatagcagcaactaatggaccgcttagagaatcaataagtccaagaatacttggatttgtataagcaacaaaccagcatgataatacaacaaaagtaaggattactgtcttaattgttttttcttcaatatcttttccacgtgatttaccgaacttaataatcatgtcacgcattacttcaaatgctccgatataatggccaaggaaagactttgtaatagccacaaaagcaataattggagctgcaatagtgattacaggcgaattaagctcattagcaagatatgaaagaattgataagttttgttcttttgccatttttatatcatctggagtcaagctcaatgcgctactccaaacgaagaacataacaacagcgaatgtcatgatataacaaaccttttgtatttgcgcacatttagcatcagtggcttcgattccatacgtagctctctgtttcacaacaaatgatgaaatcataggtgaatgattaaatgagaatacgatgattggtagaatcatcaatatcgttccaaaatagcctgttcctgttgaagcagttgaaacagctgaaaaactaagcattgacgtattccactgtggaattaaagatattgcgataaaaagtaaagaaactatgaaaggatacactaacatactcattacctttacagtaatatcttgaccaaaattcagtatagcgataagaccaagaactaatacaagtgataaaatagctcttggaggttctggcatgtgcaattgatgcacgataaaactacttgcagtgtttgtaagcgcaaccgaatacattagtacgattgtataaattgaaccgaaatatacgatgttaaaaatgatactcgctttatttccgaaatactctctaattgtacctgtgatcccctcatcagcagaattagaagcgtatatcattttagcaagcgccctatgtgagtaatacataactggatatgcaagtaatgtaattagtagtaaagataataaaccacctgaacctgcattaatcggtaaaaagagcacccctgctccaattgcagttccaaatagactgagtgcccatgtagtatcctgcttatgccactttttcggatctgcatattgctcattttttcgtgcggtattttcagcttgaacttctattttctttgcagtattcccgttcatataataactcccccttgtatctattcctgcatctctctttacacctaacaaatattcccttttcggaaaatgaattccttacaagttgccccactttgtatgtccttcatcataatgaatccaaattgaaacattcgctagttagcgtcctaatataattgttagcgttcacaaaaaagtttactcgtaatatccgctctttatataaagacctcttaagagaacaatatagaatagacttcataaatacgttgcaacatttctaataacagtgtattactttaatggtttctcttttttacttttaacagtaattttagataaaccggcctctcttcatttgcgaggcatttctttctcaattctatacattaccttcataacttcggtagcactgatgatactgcttacacaagccactgaagcacattacatacatttcgcctctaatcacacacctttcttactagtaatcgcattttttatattttctccagagataataaaatttctctcgacgccctcattataacgtgtatatttataaaattaatatttttatattttcagaaatattaaagtgcaataattttatatggataatattttacagttagcatgtagccattgtttttatcgcttaaagctgaattagttagtaaaaaaatacaataatacattgttgttctaggttactcattataaagatacttatatcccctttatcaaaaaatttcattttaaacataaaagatattctaataaataattaatgtaggtaaaaagaaaaaattccaaaataaaaaaaaaccaaattttaggatatatattattaatattgaattcatatacattttaaaaagatacactgagtaaaaaacaaaaaagctgccccatatggacagctcatttacataattatcgttatcaggaatatctctatgtttgtaatgaatcgtttttacatcatttccttttatgcgaaaagtaattgtgtcctctccataaggcggattgtgtgcaccctcaaaagtttaaattttaaaatccctcattaactagctcttttatcgagtttaattttgaagaaagctcgataaaccattcttcatcccctgttaataatgcaagatctataagataaaggatttgttccttatttattacctttgattcagggagtttgttaacgtgtttactaaagagtaaaatcgcttcgtttattgtgtactggccgtcacgtttcacaatactaactgtaactatatcctctacatcatcaagtgatacaatataaccaactattaattcaccttcatttgatattccacgaacccaatctcctacttttaaaacatgattattatttgacatcataccgtttcaccttcctataaatattttttgtgacaataaaaaagatataaaaacaattatactgtaatatttttcattacatttaagtgttaagaactcacggctatataataattaagccgcttaacgctcttgattgataaggtcaacaacttctttcattgtataattctttaagtattcacctagatgctcttcagcacctaagaaaatagcgaaaagaacttttcgcatgttcgaacctacaacacactgattgtttgattctggacacttcggctgcaaagcaccttcagaggttatctgataaatatgccaaagattaatttcatctaaatcgcgagcgaaaataaaaccgccaccagtcccctctttcgattgtataaacttatgtttttttaacaaacttagtactttgcgaatgcgtactggatgtacacctgcactttctgaaatagcattacttgttgacatccgatctggctgtaaagctaaataagttaaactgtgtatggccaaggtaaagtcgctgttcatgattttcctcctacgatcaaaaatattgtttctcatatattaactgtagccataaatattacagataggttagaacgttaaaacatatagaatacttcttgccataaaaaattaattctcttatattctatccggtcccacctatatctgataacttcatttagctttttaagttgaaaataaaattaaacactccactgtttcttcacttgttcttctgccaactgtttaatttttgtccaaatcgtatctttactcacaataacatttgtttgataatttctatcattataattaactgtaacacatacttcaatcatcttctgcttcctcctttcaaaaaactttttctaaaaatactacttattaattggccaatttttgcaattcaatgttcaaaaacgttcgaacgctacgtggtaaaaatttacgaatttcttcctcattaaaaccaatctgcaatcttttctcgtccagcataattgggcgtcgtaacattagtggatgctcaattattaatgtataaaattcatttagcgagagctcatcaatatttatatttaagtcctgaaaagttttggatctagttgaaataatttcagtagccccctcttcagttaaacgaagaatcgatttaagctcatcaactgtcatagaatttgatacgatgtttttttcaatataatcaatttgatgctcttcaagccatgctttcgcttttcggcatgaggcacagcttgctgttgtatatagaattaccatatttaactcactcctttaatgttatgaaacgtacattttaaacatcggttattgaaatgtattaaaaaaaattacagtttagaatcaaatacaagcaatattatttattcgagaatatttaatttatctacattttacagacgataacaactcacttctaaaaactatactgtaattttaaactttacagttctataaatcaaatgttaagtcttggattcattctattaacgtataataggagcagttgagacaatacttgcctcaaccgatttttatatctctttataattttttgcagtaatgactgtttcaaactcaaaggtttcgggtagatgatctgcataagaatattcaaaagttcgtccatccgttaaataagctacttgttcaactcgcattaggaaatcctgatttgttaagttcataaactgcttttccctatcatgtgggcgaattcctttaaccctgacaacagatgtccctacttcaagaccaagtttattttgaatatgtgagtatatcgactcctctaaaacagaagcctcaacacctgggataaccgaaattggcatccatgtatgctccataatcgtcggaatgctgtgaatgatgcggaggcgaatgattttatagacgaaatcaccgattgaaactcccaatttctcagcaactacttcatcagccccaacaatcgcaaactcgataattttactttctacctcactgccgtatacagctttcgtacccgttaaagtttgaatcattcgtgccttttcctgttgacgccaatcttgcaccactgttccacttccgcgccggcggatgatgtagccatctctaactaatagatccagcgctttcttaatagtaagggctgaaacaccaaattcttcagcaaggacggggctactcggaattttttcgttgattttatattcaccatctaaaatttgctgtttaatcttttgataaatgccgaggtattttacttgtgttgatccgcttgccatttccatacctcctttatactgcaaactctcttctattcattcaaatgtaaagcctcaagtttgtaaactgaaggtgatggggcagcaaatccattttctaagatttcaatattcgttaccgcttcttcgtctttcacaagttttggtgcaccatttataattgtttcatacgcggcatcatagaaacgaccgtaatcaccaagtggcgttttaatttgtttttcaatccagtcaccatttgcattacgatacttagcaactccatagtacatcggtgaatcttcaccaaatcctgcactctcaggcataacacccgctttcaaatcattttcctgctgatcttcaccatatttaataaatgatccgtttgttccatgaacgataaagcgtggataatcttttgctacgacatggttcgttttcagcttaatcttcaactgatttccgtaatgtaaaccaacatcgaaatagttatcaaccgcaccttccatttcattattacgaatatcgtatgtcaccgtatctggacggccgaatagtgaaatcatacggtccatcgtatgaatacctaaactgtaaaatgaaccttcttcttttggagcttcatgagtgattgaaccaggacggaaataatcaatatgtgattcaatctcaataatatcaccaaggaacccttgttcaattacttgcttcacagctaaaaaatcaccatcaaaacggcggttttgataaggcataactactacacctttttctcgtcctaaagctaataattctttcgcatgttccactgtatcgcaaaatggtttttcaacgataactgattttccagcaagtataacttttttcgctaattcgtaatgcgtatgtgctggcgtacagaccgtcaccacttgaatttccttgtcattcaacaattcgtccaaatcagtagtgaagtaaacacctttttccttatatggagccgctaatttttcatttatttgacgtacaaaaatcgtttttatttttatattattacgcgtgtttacataaggtaagtgatagcggttagctgactttccaaatccaataaagcccattgttaatgtcatatttttcaacttccttgctcataaattttcgtttctatatttattatataatttaattattaaaagtatatagttttaaatttataattatatattaaataaaaaatccacgataaaattcgttctcactataagttatggacctataaagtgaaactttaatcagtggggcgatttattctctactgattatttacccgtaaataccgagatgaaaaggagcgtaatgaacatggcatatactactatatctatggaaattttcggatcaactgaacaagtatggcaattaatcggaggtttcaactcccttccagactggttaccttatatacctagcagtaaattaactgaaggcggtcgtgtacgtcatctagctaatccagatggtgaaacaattatagaacgcttagaagtattcaatgataaggaacgctactacacgtattcaatcatgaatgcaccgttcccggtcactaattatttatctacaatccaagttaaagaaggtactgaaagtaacacatcgttagtagagtggtctggtacgttcactcctgttgcagttagtgatgaagaggcaataaatctggttcatggtatatacagcgatggactgaaagcattgcagcaagcatttctagattgattcatgtaattgattgagacgaaaaagttaattaacagtcaaacattcgactttgtggttaagttcattatgaaagataaacaaatacaaatttcatgcctgcttgttaatgacaagaaataaaaaatactacctccaaatggaaggtagtatttttttattaatcaggaaaaacaattaatccctcttctttttcttgctgttttaaatcttcttctgggaatgttacagttgaatttttatcccctgttttttttgtttcttcacctggaaatacgaaagttgaattttcttttccttcatttttttctacgttatctggaaataccatagaatcattggtagttaaatcactatgaaaaccaaggttagacaaaatcgcttttaaatctggtaaaacccctattttatcagatgatgggtcattagattttgtgcctgtattaggattacttaaaattgctctcaattcttttggtgtatatgccttacctaaatgttctttagcaatcccttgaattgatacagcagccccagcgattataggcgaagcgctagaagtaccacggaaattagaagtataacgattcattatactctgatctgtaactttttgtcctttactattttgattttgatatgtatctaatgtatcaacatactctccccaaccatatacatcaattctactaccatagttagagaaacctaaacgtttatgaggaactcttgcagtagatgctccaactataatagctcctgaatctttaaagtctggactatttcgatttaaaatctgtttaccattacggtctttaaatttatctaaatcaatcccaccattaccagctgcttctacaataataatacctttatctgtacctttacgaattgcgttaaatatactcgggtatacttctactggtaaagggtcatctccatatccatcatatttaaaggattcttctattaataaaacatctccagcctgtaaagaatctacggcacttaaaatagcatctcttacatcgattctcccattatctcggatcactgaaattacttttgcctttgcttttggtgcaatcccaatgttcccaatcctattgtcagctgcagaaacaacacctagaactgaagtaccgtgagaaagatcattactcatttttccagacataaattcaatattttgaccgactaaatcttcatgatttaataaccagccttcttccaaatctacaaaggttgctccttgaccatctcctcctttaattccccaagcataaggagcattaattcctaaaggtgcctcttcaagatatccctgtctcaaaaatctaggttcatcataaggattgattgataatacaggcaatctcgagctagttgttgtgtttatactcttattagaacgaaattgtattttactagaatcgttattggcagcatgtactgtatttgttacaaatgtcgtacctaccccagcaaaagttgtaattgcaagtgatgatatcaacatacctttaaaatttttcatctttccacctctagttttctattagaattaacatatttaataatgtgtatgaaccgaaaagctttttatcttattataaaaattaatagatttttataactttttgatttacataaaaactcctttcattcttgtaattcaatgtgtatatttcaaaataacaaactaactgtaactattatagttacacctttattgattttcaactacgaaatataaatttttaaaaataaatttatattactttaaaacagagctaaccttttacgcatataaaaaaaacaaaatatctgtgcaaattacagcggtgaataagtttatagactgcaaaaaaacaagaaaaagcaaaacactaagtgctttgctccttataaaattccttttaacttttcaccaattaacctcgctacatactcatagccttctggtccaaagtgtaatccatctttttcaccattttctacaaatcttttataatcccgttcttgaatcatttcagcgaatacgtttagaaaataacttcctgtttccctcgccactttctccaccacgtctgcatactgaccaagcactctatttgttctattacgctgtttttcttcatcaactggtgcaggactaatcagtagtactttatctgatgaaatatggttcacaatcttctctaagttttctttatatgcttgtaatgacacttgagaaaaagaaaccgcatcattcgtaccaagaaaaactgttacgaaatctggtttatatgatattacatcttcttcaatcctatttaacgcatcgaatgtattatcccctggaacacctgcattcactactttccacttcggaaacatctcttgcaaacgtggtgttaatctcggcattccatcaaaaaatgtttcatcagctgtaatactatctccaaagcatactaacgtttttattaagctactctccttttacgtatgaaacaactttccttctattgcttttatatatctttcagcagaacgttcaactgcctcatttgcattttcttttactactcgatgaaaagcattgtataaacgattaaactgtaacggcttcactcggttcaccatttcttccacttttctcgctggtaatggaattaagtttggatagctatacataaaacttacccaccgctcatccgctacaacttgaataatatcacctgttaacaaaatcccttttccatcattaccttcttcccaatgcaatacagaaccaccactaaaatgtcctccaagacgatgtacagtaatcccatccgctaattgtaaagactcaccagaccaataaataatacgactacttgggcgcatcacccattctttatcatcttcgtgtatataaattggtacatcaaatgtctctgcccattctacttgcgttgaataataatgaggatgagacaatgcaatcgcatctaatccaccaagctcttttattttcgcaattgtcgtttcatctaaatacgtaatacagtcccatagtaaacgatatgactctgttttcactataaatgccgtttgaccgatcgcaaatcctggttttgtcgtaatactataaagtccattttcctcttcgattattacatttttatatgtatcatctgtttgcaaattttctaaagtcgtccaagactgccctttcggattcacatattgcctctcttcatcacaaatatgacaactcaccggttcctctacactcgctgcatactgcacaccgcacgttgtacaaacgtaatttttcatcataattccccctatccctatatttttattaaactgatttttgttgataataatctacttttttattttcaattaataaacttataaaagtaagtaaataaacaactgtaactgacaatggaattacagtaaatcctttttcgcttctgcaacattcatctcactatctccccaaaaatatttgtgctataaagtcacctcaacctcacccatccaataacgccaagctgctaaataatcttctaaatctttcgggtggtgccgtaaacacgtatctatacgcaaatataatcctatgactatttcttcatataaatcacggtcttttttatgaaatacacattgtttcatcgcataatcgattgtttcttttgttaaatcttccggggttgaacagaacgcataaattaaatcatatataggatctcctaacactggtaaaggatcaattacaccgtgcagtttattctcttgaaatataaaattatgaaatccaagatcaccatgcaataaaaatggctgatttattccagtccccctacttggactatttgctaacttaaaaaccgttctatactcttcctcacttatgtaacgtcttacattttcatgagcttccatcacatttgtcgttaaaaattcattccaagattgaactgggctttctttccatccccagccatcaacctctgtagctacttcatacttattgataacttcctttacaagtttactaagaacactccgtttatggcctagtttgcaagaagttgtgccctcaaggaatgagtaaacaatatagcgatttaaaggttccttatataaaagctttggaaataattcgtcctttttataaaactgaagaaaataagcttcttcacgtatgacatccgattcattcaactttataacgtattgttcatctaacaaatatatagtacttgtcgttcccccgtttaatgcttttacgctatttggataatgtgaaataactttttccttaactagttgtgcagtgattattgaaatgtccattctctcacccttcaactccgaatatttccttaattcaaaagacaactttactatcatttgacaaacaaaagtaaaatcctttcaatcgccctgatataacaaacaacaattttattttattacaatgactttcttcaatattccatttatgataacgtgattttatcactctaaatgctcttcatatactctaataatttctattgcagggtctctgtcttgtaatttatgagccaaactttctacaccaaacacttctgtaaacgtatgactacctacaattaaattaattcctttaaatttcgcatgttgcactgtatataatgttttttcacctgttatgtacgtgtcacatcctttttctaatgcacgttcaatcaaatttgtattatttcctgcaccggttaagattgcaatccgttttactggtttatcgtgatttctccagctcttcactttctcttccattttttcttcaagttttccaactaagtttgaaaaaggaatggcttctttatattctcctattcctggtagttcttcttcctcataggttgaatattccagtattgtatctatcctaatttcgttaaataacgatgtacacgtgccaaactttacaaaatctaacggcaaatgaatccaaaaatgattcatttcatattgcttcaatttctcaatacatgcctcttccataccaaataaaaaactccacggcgcatgatgtgtaactatcatatcgactccatttcgatacgcttcttcaatagtttctaacgttaaatttgttgtgtaaccgattttgtgaaattcatctttacttatataagtaaaaccatattcatcatcgccatatttatgaagatgctctccaaatagtgatgttatatgttcattaaattgctttatattcatttttatttctcctttcatttacttttatatttcataaataaggaaatactaaattacaacgttacatacatataggaggacaatatgaaacctgaatttttaaaagctgtacatgatgcaatcggaaatgtcgaacacattcatatagaggaaagcggtgctgacagcttacttattcatcatgatgatgcacagcagttacaacaagttgctaaggcgttagaaaataataatttccgctccgctttaagaacaactggaaatgcttcgtacattgaagtattgaacagataatgaaagtccggatgtattccgggctttctttttatcccgctattcaccgggcagtaagaccccactgattaaagttccactttatattgaaacttcaaactctttcacatacaccgctgttccagcaatatctatttgtaacttttcgttttctatccctttcgttacataaacagttacacgaccatctttatttatttcctgtccttgctcaacgattaaacccaattcatgttcaaaacctttctctaaatactccacataatacgctcccattacacctgaagctgttcctgtcactggatcttcaatcgtcccagcgtaagctgatgaaaaatgacggccgtgcatttgtgctagttcatcataagtttctagacaaattgggtgaatagaagcattaggtatttcttttaatactgatggaaatgcagcattattaggtttcattctctcacatgcattaagatttttaatcggtacaattacagtccaattaccggtacttccatatacaatcggtaaacttacatctaaatcatttacttctaaaccgatactatgagctaattcttctgttgaacctgtaaattctttaaactgaggtgctgcctgtctcattttaataaaggtttctccattttcatttacacctatttgtatcggtaaaatcccagccttcgtttcaatcgtaaggttacttttctcttctaataaacctttttcgcgcaaggcaaatatcgtccctactgtcccatgaccacataaatccatttcaaaaccaggtgtaaaatagcgcattcttatatctcctacttctgtggaaagaacaaaagttatttcgttatatccaactttttcagcaataatttgcatttcctcttccgttaatccatctgcttctaatacaatacctgctggatttcccttatttggtttattcgtaaatgcgtcgtaatgaaatacatttatagtcttcattttcttttctcctaaccttctttaaagattttataatacagctctatctccgttttcaacgaacaattatttctccaaaatatcctctgcatcttttcatttgaagtatgtgtgcttccaatgtaataagtagcccctatttcctttaacatatgcaacgattgaaaatgcatatgggaagcaattcctttcccccgataataaggcattaccccaaaataaaataaccgtccttcactttctgttccagtttctatatgcggtatggacataccaatcggctcatttttatcataaaaaacaatacatgacttttcccagcccgtacctaactctgtttgcactgaataaaaatgttcattgatagttaaaattgaagtttgattccctgaacccgacatacattgttcccaaatatatttaaattctttttccgataacgttccttctgctattgatcgatatgtatattgtctttcaagcttttctacattattcaattctctacatacttctatctttgcggcatacaaagaaaaaccggcatcaagtaacactttcacacttgagttataactactaaaccttttgtttaatacaatactcgctctttttaactcccaattaaaacaaacctcttccaatctacttatcttttctttatatgtttgtacgttatacaaaacatcttcttctatttcttcaatcgttactgcctttggtaagccatttaatatttttttagaagggccaaataagtttttgatgactgtaagatcgtacttcaccactgcacctccaatctacaatttctatccgtaataaccactctcatatactcatctccttatttttaaaataaataagaaaatccatccacttaccattctctaatgaaaacgcctttctcttgcattcaaatgaaaagcctgctctttccgcaagacgaaccgatggctcattatcaacacgtatatgtaattcgattctatgaaaatcaaggctactaaaaaataacggtaacgcagctttcacactttcaacaccatatccatttctccaatattgattatgtatggagtatcccatcatcgcccattgatagtccatacgtaaaatttttattagctctagctttccaatattagccccatcttctttacgaaaaatacctaatacatacatctcatctcgatgtgctgcttcatcaaatcctctaatccattccgtgaaccattcttttgttgatgatgccataacttgataaccatcgtcgtatttatactgagatggcagcctcttattaaatccatctaaccaactttcataatcatcattttggaacggacggatcatgagtctctctgtctctatctgtaatagcggcagcttcatttacatctcttcccttgattaatatttgaatattctttattatcttacacaaaatacaaaatctagtaaattattatgtttttgataaacatgcttctattaaaatacaaaaggaaaccctgttctaaaggatttccttttgtcatcacactaccaaacttatctgtaatttaaaacgttgtattctgtctttaatattccataaacatcaacatcttcatatgtatttaataaaagtctattttgtctcaatgtaccttctttacgtaaacccgacttctctaatactttaatcgacgatctatttctggaaatggcagatgcccaaattttgtttagacctaattcgataaagccaaattgaatcattctgtttacagcctcagttgcaaaaccctttccccaataattcttaccaatccaataaccaagttcacctctattgttacccttgtcaattcttagtgtaattgtacctacaatttctcttgattctttagagacaattcctaaaggatattcgattcctttcctaataagttctggttgcatatcaacccaatcttgcgcgaactccagtttatatggatgcggaagcccaagaatattagctaattccttgtcattagccaattctttaattctaaaaacatcatcattggtaaaaggttctatacataaatgctcagtttctaattttatagccatcttttctcccccttgtactgaaattagttagatccctttattttcaatattacaccaaaaacacaaaatttttaaaatctttatgatatctactaacagaaccataaacaaaaaatccagttatgctttgtacataactggattcctcattatctaatgttttttattttacaagtacattttctcttaattccctcttcaacacttttcctaaagcatttttcggtaactcttctaagaataccacttctggaattttgtaacttgctaacttctctttacaatactgaagaatactttcttctgttaatgttgtttcgccatccttcacaatgtaagctcttggaacctctccccaaaagtcatctggaactccaactactgcaacttctaaaacaccatgtatttcatgaataacatcttctacttgatctggatatacgttgtcaccaccgcgtataataacgtctttatatcttcccataatatgcaggaatccatcatcatctatcatgccagcatcgcccatgttaaaccagttatcttttactaccttctttgttgccttttcattattccaatatcctttaaacatgtatggacttttcacatgaatctctccaacttcatttgttgttagttcatgtcctgtttccgggtgaacaattttcacctctacatttttcaaggtctttcctacagaagacatcttttcttttcccatcattggatgccatgaggttacaacccaaccttctgtactaccatagccttgcaccatatatatgcctttttccatatatttttgaatgagtgtttctggcacttttgtaccaccgctttgtgctactttaaaggttgaaatgttacgttcttttttatttagttcatcaagcatgtaactataaacagctgggaaagcaagcatcgtagtaattttctcttcttcaatcttatcccaaataagagcaggattcgaatcagctaagaagatcatcgtaacgccatgataaatacaatttaaaatagaaagcacgccactcatatgaaacaatggatgcacagataaaaagcgttcacctgctgggatttctctttgtcccgcaatttcagcaaaataatgatgtaagtttttatgtccaattacacatgcttttgcctgtccagtcgttcctgatgtaaacaagtaaatggcatcgtcttcttcatgaacttctacgttcggttctgtcgttggctgtttttgcaactctaattcaaatgaaccaaagccttcttttgttgtttgaattacataaggaatttctttaacagcatcaacctttaataacacttcattaaattcttcatcaataactaacacttttaatttcgcttcttttacaatcgtttctaattcataaacagtcagctgatgatttagcggaataaataccgctccaatttttaaacttgccatcataacgcttggaaatgggtgattatttttgcatagtattcctatacgatctcctctttgcacaccattatataacaaataatgtgcaaactgatttactcgttcattatattgctgaaacgaatatcttttcttcccccctacaagcgcttccaaatttggtgattgcattgctctcttttgtaataattgtcgcatcgttctcaagtaaaactcccctttatatatgttaggttttttattttaccagattaactattaatttactaaagattacacttagtgaatataaaaagaatataaaatatccatttactttacaagtaaatggatatttcccattatatattagaatacttcttgttcatcacatattgcacatactcaggtgcacttttatcaatctcttcatcacttagtttatattctgcaccatataaataaaaggaaggtataaattccatacctgtgtataagcatgtagcttggaatggtttcgtcaactcatccattgtaattccactattttcatagtctttttctaatccacctatagaaatagccacaccaaattctttccccttcactttatctcctttagatccgtacgcaaatccatatgttaatacatcatcgaaccatttttttaataatggtggtgaactgtaccagtaaagcggaaattgaaatatatatctgtcatgttctactaataacttttgctcttcttcaatatcaaactcccaattcggtgccactttatacaattcatgcaccgtaatttcatccgaatatttctcaagttcttcaatccatcttttattaatttttgatttttcaatatcaggatgtgctacaattacaagtgttttcatcttttttcatcccctttataaattattcaaccctttacgtattagtatgaatgagtcacatataattgaaaagtacgtactttaaagtgctataggaaccttaaagtacctgtggaggtgttatatgaatcaaaatgataattgcccaattgcaacaacactcgatgtaatcggtggaaaatggaaagttcatattttatgtattttgtcggatggaaaaatgcgaacaaatgaaattaaacgagaaatcccaaacattacacaaaaggttcttacacaacaacttcggcaacttgaagctgatgggattatctatcgtaccgtatatcaagaagttccaccaaaggttgagtacacactaagtgaatatggaaaatctttaatgcaaataatggataatctgtttgaatggggaaaagatcatcagattaaaagattacatgactaaaaaagcactatatactttgtttaatcctctacgttcatattttttatttctataaagtttattttcatcattttttagctaacttgttttcttagattgatggacgtgaccccacatccatcaatctaaaaagatacaattagaaaaatgagatttctataaagtttcacatataaacactacttccgcctcattaaacgctcgctctactttttctaatctcaattgtacgtaagctataaagaagcacccctaaaccgagaattttttcattattagacgcattagaacctaaggtaatagtaggtacatttaaacccataaacctttcactccgttctataggcatataaaaagatactccttaaaaataaaaaacgctattctctctgtaaaatcatagaaaagaatagcgctttttattttgaaatagaaatcatcatttaaactaaacatgctaatattgattttgtgcgattgtcagttacctcataataaatttctaatcctttccgagtacctgtaaccattttagcagcttttagtttagataaatgttgactaattgtactttgaggcatttgtaaatctccatacattgttgttacattagtaggaccttttgcaagcattatttttactaaagatagacgaactggatgcgccaatacctttaacacctcagcgatttcttgaaacatttcttttttttctttcatcttatttctccccttttatatacatatttatgttatccatatatataattcggaggtatatgcgtttttgtgtccgtcattttaaaaaaatataaaaaaactttaatccgaaactaaaggattagcttaacataatgtctcaccattaatgatgaataggaatctcattatagaagcagcagtttttatactacaactctacattcaactaactaaaaccaatgaaaaaaagagcagatagtctgctcttttatgatgcctccttatgttccgtggaatgtttaacactccccagtctctttagtttattccaccctaccgctactcctcgaagcgatgagaatatagatttaatgacaacataagtcataaattggcgataaataaaacgttgtaaaattaaccatgccaatggttttgggttctcttcctctaatttaaatgcgaacagagaagcgagaagatccattaaaaagaaaacaagataaaatcctaaaacttttagcggattactactaaatagtcctataatcattaatatatctgcaaaaggagcaatgaattgcagcacatattggaataaccacatattaggcagtgcaataaatcctaatgttttatgctttggattacataacgcttttcgatgtttccaaagacattgaagtgtaccatatgaccaacgataccgctgtttaatgagacttttcacatcttcaggtgattccgtaaaagcatgcgctttttcttcatatacaattctatgcccttgacgtaaaaatgtaatagtaagatccgtatcttctgctaacgtatcttcgcttaaatatccagattcaactacattctttttgcgccacgccccaatagctcctggaactactgtaatacaatttaactcatcaaaagctctacgttctaaattaaaccctgtaatgtactcaacatgttgccaagtagttaacaaattccgtctattccccactttgacattacctgaaactgcagctacattctgatcttcaaagtgtctaaccattagagaaatggcgtcttgcgcaataatagtatccgcatctaaagtgacaatgatttctcctcgcgattgttgaaaccctaggttcattgccgatgatttcccgccgttttctttctgaatgaaacgaactttagggtgtttataaaatgtttctttcattacttttgacgtaccatctgtcgatccgtcatccacaacaataacttcaaattctctataattactatccaaaattgagtgaattgtcttggctatcaccttttcttcattatatgctgccatgacaacactaacaaaaggttgataggacgaattaatatagcgagataacgtttttcttttctgcttccatgcaaaataaattaagaataaaaatcgaaaaatccctaatccaatagcaatataaaaaatagttgttaatatatgcttaaagtatcctgcccctgaaaagacagctttattgtaaagtaaatattgcttcccctcagaagaaacaggaggcatgatttcatctcgttctttattcattaaatctgaaattgttacaaaactatatccatgcttttttaggtctttaataatgattgggagcgcctctactgtatgtgtacggttccctcccgcatcatggagaagaataatatttccctctcccttataaatgggattaagagcacgctttactaattcatttgttgatggtattgcccagtcttcgggatcaactttttccgctaccattgtatagttcatattttgcgcacgtaaaataggcaatatttcatttgatgaatccgggttagcatccgcttcatatggcggtctaaataaaaccgtagaatgtccagttacttcctgaattaaacgttgcgtcgtattaagttctactttcgttcgtagtaaagacgtatctgctatgttaggatgcttgaaagtatgattgccaatttcatgcccttcatcgtatattctttttacaatactagtatttagttgcgcgttttcaccaagtacaaaaaaagcagcttttatttgattctcttttaatatatctaatatttctggcgtatatttcgggtctggtccatcatcaaatgttaatactacttgtttcccatttggttttccatatcgttgcacttcatatgcagatggtaaggattgatatacttcatctgtaatataatcatctttgcctactttaaaatctctcaatccattttttctttcattctcaatctgtaaaatttcaccttgtccagaataattcacttcatctaaactacggattttatgtaatacattaggatttttttgtacctcaataggattttttaaaactttccatattgtaggatcttctgctcctaatctccatagcgcaaacccctttgcatgattgtccattgcgattttcacttgattataaagagtaacaccgtctaagaaccaagcagtatgttctttctctcctgttttatatctaaaatacggatttccactcaccttatcccattgaatttttatatttgaatcatgagccattgccataacttctgagaaagtcatagactttgcagcttctttactatttacttcccaatcatatccatagttaccgaaagcaactacaagtttatcagacggaatattcagttctttcaatgtatgttggaaccatttatttgaagcaattggtcctggttccccggctccatagtgctcatcgtacatcattacaatcattcgatctattatttttgctaacgcactataatcaaaagccttatcattagctggaacatcttgtgtaacgagcaaatcatgttcatgaaattccgtagtaagttctttcataaaatttgttaagttttctctatcactttcaggtacggcctcaaagtcaatattaatacctgaaaactgattttttttaacttggattactaaatcattaataaactttgtctttacatcgtttgaggaactcagtaacttatgaattagcccactatcaggaccagaagcttcctcagtatagttagtaagcaaaggcataatcttcacttgatttttttctgccaactttactatctcaggttttatctcacttctaatcgttaaatctgcttttaaatgataccactctggtactaacgtagttaatgaatcgatattttcttttaaagaagcggtactattttcatcccagtttacataaaaaccatacacttctttaggatgtttactatccttcggcggattcaccaaatttttattatccttcgtttcggtatttgggttaaatgcttcctcctttaactgctgatcactaagtttttgattaattggtacaagtttagtatcttgttgtacagcggtattcatatttggaatttctggtgttgaaaaaatactttgaaagaaaaaataaaatacaacacttacactaactattgagatacatagaaaccaaataaaggctatgtttctccttcctttcggatcataaaaaacaggtttttctttatctttctcttgttgaatgtttttctccattatatttttcacatactccttcttaatagaactatagaatattaaagtgcaactttaatcagtgggggttttgttcacccccccactaatcatcagccctcaccaatcgggctgcccagcaaatagcggaataaatccttttagctttgaagtgaatctctcacttccatattctattgattcttcttttcattcccttgctggtggcccctattttcttgttgagaccccctaccattgttcccttgctcgtttccgtcattttctttctgggatcctcttccattgttcccttgcccatttccattattcccttgttgagatcctcttccattgttcccttgctgattcccattatttccttgttgaggatttcttccattgttcccttgcccatttccattattcccttgttgagaccctcttccattgttctcttgctcatttccattatttccttgttgagatcctcttccattgttcccttgctcgtttccattatttccttgttgagatcctcttccattgttcccttgctcgtttccgttatttccctgttgagatcctcttccgttgttctctttcctatttccattatttccctgttgagatcctcttccgttgttccctttcccatttccattattcccttgttgagatcctcttccgttgttcccttgctgattcccattatttccttgttgagcttctctactgttattctcctgttgattccctctattttcttgctgagatcctcttccattgttttcttttatttgcttcgatggctgttcctctgttttcttttgttctttctgctcttgcttttcatattttttttcttttacaggagacaaatcgagtgttgcatcaggagatgactccgggtgtgattgcacctcttcttcgttttccaccggattagacggggtgacaggaggcgtaagtgatttgttcttctcattctcttgctttatataaacacctgtgccaattccagcttttctagcattctctcgtatttgcattgtgctactttgatattcaactgtaatatgttttagctcatattctttctttaattctttcattgccttttccaaaagtggttctagtgccttgtcctttgcaacagctgttagcataacttgcttatcattcgttaaatacttatcctcttgactttgctttataatagtacgtattacttcttgtaattgtttatttttccattgcttcaattcttttaaaatacgccttccatcatcattacaagcctgcaaatctataacacgaaaatcctttgttacgctcacctctaaacttggatttatatcaactgagacgtaagcaaatactttttcttctggttggttgtagaaaaacagcactgcaaatagaaaacaagcaacaagtattgatgcaggctttaaaaaggaaggaatcgaaaaatgcgatgctttttgttcttgctcatcaaacgagatttcctccccgattatgcaagaatcccctcttcttttacacgtaataaactctccatttggtgttaaaacaactacgctatgcttttttatatccatcacaattcctttattcatcatgcttttcccctcttatgtaatccagaatatatgtatagttgtttgcaaaaataatacacattgcaataatgtattttctatgtcgttccaacgttttacgacttaccctaacacgcggttcaatctgtttaagcggtaactttttctttcggaacagctcttccatcatttcctcttcttttataattattttcacaatttctattaagtgctcacgtgtatcacgatgcttaggagattctttagcaagctctgagaatgtgattttaaactcagctagcacactttgaaaatgaagaatttcctccttacggttactattttccatctctttcatatactccgtaagcgacacttgcatttctaacatttcctcttgctcatcttcttttaaaaagacaaagttatgtttagactccttacgtatatagtcaattacatctctttttataagaagatcagcaaacgctaaaaaggattttccttttgtataggaatactgttcaattgcttcgttaaaagcaaacaatccaatgctatattcatcatcctgttctgtaatatatcgacggcagacagatgagattgattttctaataaaaggctgatactgtacgataaacgcttctttgtcttcttcgttgttttgtatgttatatacgatatcttctattttcggttttcttaagatcttcattactaaactcaacacttgtaatctcccagcctccttcaaatagcaaaatggccactacacaagtgaccatttaaccagattttcttggtacttttcttcggtcttgttttcttgctgttagttatatttttcgagtctaacttttcccaacgttttcttaataattttccttttctctcggcactaaagttaagtttgtatttttatctactttcttattttctaccgttcgttttgcttattctctttctattttatctgcaatccttgaataactcttctctatataattggtaatttcatccttccattttggatgccacttaatctagtaattttattaatacttctatattctttcatagtcatttttcttctatttatttttttcactatacatattcggaggagtacaaagttttatgggggtcaaaaaatattttcataaaaaaatacatatttatttcaaaaataaaaaccatcaatttgaaaaagggtaatcaaattgatggttttcttataatatctattaaattaagttggattctcattatatctaaaaaagcactaactattttctaccggttttctccatttttatctttcttggttatcataatatgtcttatctgcgtattttctatcatttccttttagataagctaaaattacttttggatttttaagtaaagtccagtctccatatgtatcaaatcttctgcatgaagtcatcattccatttttaattgtaccgaatttcttattatttcgctttccccatttttttaaccgtttggcaaaatcagcatcttctgccataagcatgttttcattaaatccgttgattgccataaagtcttttctatagcaccaaaaaatccctacagatatagctccatacttaaaaagtaagggaattattattaacattgcggaaacgaatattcctaaggacattctttcaaactttccagttaccccaccaccaatgtatttgcctgaagctagatgtttatctacattagacaacatagactctgtcatttgggtatcagcgtctatagtaatgattatttctccactagctatttgggctcctgcatttcggattttggataagtttttatcgttattttttaatgtaatacagttataagactttgctatttcctctgttttatctgtgcaacgatttaaaacaactataacttccgtttgctctttatatgcctctgatgcctttgcaattgaatctaaacattttctaatgtacttttcttcattgtgtgcaggaattataatagaaaacttcacatcttttttcaaattgactcctgaagattcgtttgtctcagtcataatatgccccccttattttataaggtaaatatctgttatacataacgtatattaaaattcaataaattatatgataggaactgcaggtaaactattacttgagtattaaaaaataaaaacgttattctttctaaataagcaaaattactagaaagaataacgttttttattagttacattaatattttattcgttgctttatttcttcaaaacgagcatgtataatttttctgatatctggatgattcttatataaagtaacagtatacatgatggaagatgcaagaatagtagaccatattaaccaatctccagcatgagaaagaactttaattatttcactcgtaaattcttcctgtccgtcatgaaatgtatagctgagtagttaccttatttttaaaaaaacattctgattatttctttttcacttcttctacaaattcccatgtctctccgttatcttttgattgataaagtgcactactatcgccattgtagtctccatctgccccttgtccaactaacatattaaaaaccccatctttctcatatggcatactaggagaatcaaaaggacttattgtggactgtgtatgatctaatttcacttcatgcggcggatattctacctttttgaaagatactcccccatcatctgtgcgatataactctccttcattaccagaaggcctaattgctcctaaaaacccaagtttatcatttataaaaatgattcctgatacactaccaatccccccattaaatgggtctggattgataacctcccatgttttcccttcatcactagtcttgcttaatgaataaaaagcgctccctaatgctttatctgtcatatttagtttataaccaacttctttcgataggaaaaactgttctttttcattctttaaatcttgttgttccttctctttaagcatatcttcttttggaggcgtctttgatttactccaacttgcgtcacttattaaattatatctagcagggactagctctttctcttttccagggacaaatatagatacagtatatccaatgatatcagaagctgcttctttaacactctgcctcttaccatcctcagtaatattaataattccctctgtattggatccccaatttctttttccataataaatcaacccatacttactttcattccattttttgaccgtttgcttaactgggatcgccttaaccgttttaattaaaggttctactaatttatcatcattataatcaggctttgcatatccatctcgtattatagtaatatcttctgatttcttcttattataagagattaaataagtttcttctttcccatcaacatttttcccataaacaaatgtatcaaacgctgtgattgttccatctgaatgaaatgtaagatcaaaatcagttgccatatacaatttctttggcaaaggatattttttatttatatcttcaaaaataccttctactccagatttatatatattattatgtttaagtttaactgacctttcatgttttaacttttctataaaccatgccaatttgccattgtaatttattgcacttttataaatctgcatcccataaaatgatgtaattgcaacaataatgataatagaaatggatctccatgctattgaatttgttaattttttagattcatattctctattttttatcacccgcattgtagtaaatgtagttatggatataaaaagtactatacacaataacaaaatgtaaatattataattcattcttccgtacttacagtataaggccaactcatagcaaaagatcccgtatacaattattagtattggatttgttactaatgacagaagtatcctttttgtattttctctaaatatagaaaccactcctaattatatgaattactgatattaagtatactttattgtaaagtaacaaaaaagctatttaatcttgccgcaaaaaatacaatagacatatgaatattatattcatgttaaaaaggccaacaatccaagattgttagcctctacttcccctattcgtaccttttatcactttacttcctaacaactggaatccacatttcaccaaacactaagccgtttcttttccccatctcaaccgtcgtatttggtccaccaacataagcaaactcatttgcatctggtaaagcttgaccgaaggcgatgccagtcaacttattacttaactcttcagctgttttgtcttccccttttactactaagtattctcccctcggaaactgaattactctagattcttcttctatttgtgcttctgtcatgacacccgcataatacatcattttgttattcaccgcttcgctcacagaaaaaatgtattcatttgtcgctaaagcttttaaagtgtccagccttccatcttctttaacagccgaccaaaaggcttccttttctttatttattccagcaaagtctgtatattcactcttaatttcagttccaatacctaacacaataaagctatctttttcttctatagtataatttttcatatgcaaaacctgcctctttttttattaatcaaacgatttatcttttcatctgatacgtttataatatctttaaaccatgtcaaaaaatgatactgtttaggagaccaacatgaaaaaagttgaacggatcaatacaattatgcgatatatcaacaaccgctcccactttacaatttctgaaatcatacgagaatttaacatatcaagatcgacagctattagagacattagagaaattgaagctatgggaatgccacttgtcgctgaagttgggagaacgggtggatattttgttatgcataattctatcctgcccgttgttcgctttactgataatgaagtgaaagctctttttattgcctttatggctacgaggaatcaacaacttccctacctaaagagtcgtcaatctttagccgaaaaactactaggactcatctcagaaacccagcaggatgaccttgttcttttaaatcaactcttgctgttccaaggaactaatcctcataatcccgatctacttgagctttctgatctcccccatcctatgttagaaaaactcattcaaatccttcttttggataaccatttattgattaccattaaaaaagatgaagaaattaagtcttatccaatttatctattacacctttatcaagaaaaaagccattggattattgaaggatttgacttaaaagaagaaaagaagttaatgtttcctgtcgatgatctcatcaatatcgaaccatacacgacgaataaaaggctcaataagaaaaagattttagaaaaactaagtaagaaggctgaagcaattaaccttgtacttgaacttggtccgacagcaattgcccagttcaaaaaataccatcctttaaaaatttcaatatcttatactaatccttaccaatccacagccattttaaaaacttttatcaatgttaacaatcccgatgaagtgacggaaataataaattggctgctttttctagggaaggatattaaaatcaaagaaatacccgatgaagtattagcagatttacaaaaacgagtgtgcttatacattccataagcagtgagcctcaaatattaagctttatcactggacaattattctatttttaaataccatttcatttactacaatgagagcatgataaataataaaagcacggaaaatctcccgtgcttttctaaatatatattattcctgaaggtttcgtttatctcgtttcttaccctagctgacgtttaaatgctttactagcaaagaagtaagcaataaccataattccgacgcaccaagcgagcgcaatccaaatatcgtttccaacagttccttcatataaaagagcacgaatcgcattcacgattgaagttacaggctgattctctgcaaacacacgaacaatttttggcatcgtttcggtaggtacgaaggctgaactaataaatggaagaaaaactagtgggtacgagtaggctgtcgccccttccatagactttgccgtcagccctggaatgatagccaaccatgttagcgctaacgtaaacattcctagtatcccagctactgcaagccaatctagaatattcgcactggaacggaaacccattaagagcgcaacaagaataactacaacgatagtaagtacattagcaacaagagaggttaaaacatgagcccacaatatcgatgaacgcttaataggcatcgtaatgaaacgtgccatcagcccactctttacatccgtaaagagtcgcacggaagtgtaagctacaccggatgcgatagccattagcaaaattcccggcaataaataattgacgtagttatctgttcctgtctgtatagccccaccaaatacgtatacaaacaatagcatcatcataatcggtgtaatcgctaccgtaataattgtatctggactacgcataatattgcgcattaagcgcccaagtaatacccctgttttgcttttcatttacatctcctcctttttgccaatgatcgcaaggaatatttcttccaatgtaggctgcttctcgatatactccacttttgccggtgggaacatctctttcagttcagtaagagtacctgtcgtaataatttttccaccatgcaaaattgcgatacgatcagccagttgttctgcttcctccaagtactgagtcgtaagcaaaatagttgtaccactatcagcaagttccttgactgtatcccacacttcaatccgcgcttcaggatcgagtccagtcgttggttcgtcaagaaaaataactgctggcgccccaatcaaactcatcgcgatatcaagccggcgcttcatcccgcctgaatactgatctgccctttggtttgccgcatcagtcaggctaaatcttgcaagtagattgtcagcaacttgagcgggactggaaacaccacgtagcctagcaatcattatcaagttttccctcccagtcagcataccgtctaaagctgcgaactgccctgtcaaactgatactttgacgaacatgatttggttgacgctgtacatcaaatccgcaaatacttacttcaccactatcttgcttcatgagtgtcgaaaggatgttgaccgttgtcgtctttcccgctccatttgagcctagcagcgcgaaaatttctccacgctgcacctcaaaatctactccttttaaaacttccttgtctttaaaggattttttcaagccttttatagaaatcgctgcatgactcatacttttttcctccctataaaaatgttttgcggagataatttatttacctctatctatttagtaccactgatattctgtatcacttagtaccgagctaaaaatataactgaatagctatggtggcaattcatatgtgtaaccagctaatcagtcggtattacttattccatttatttttttctcaatttcttcataatactttcattcaaatcttcacgatacttggagacgtaagttttagcatttgccactagttcgtcagcaaaggaagccacgtcatccccagtaatgtcaagcacttgtcttccttctgctgcaccagcttcaaacaaatcgattaattcatactgtatgtgtaacatatccatcccgttacccgctgagaaattccacatgtagttttgaattttcttaaatacaaattggtagtcctctggcagagcctcaactcgtgccatcatcattttgtactcttttttatcaccaattaactttttaaacatttctaacatcttattttcctccttttttataaaaccgaacaagaaattcccaaagtatcggccggaacattttatcttatgaacctattttgacttcaagacgttaatttttgacgatacaaaatcccattttttccaaaacaattcaagctcttggcggccctcttcatttaatgaataaaacttacgaggcggtcccatatctgatggtttcttttcaatattcacaagctttttcttctctaatcgtacaaggatggtatacaccgtaccttccacaacttcggtaaacccaagatcattcagatggcgggtaatctcatagccatacgtttcacggcgactgatgatttccagtacacacccttccagtgaaccttttagcatttcagttaaattttccatgtcctgatcctcctttaccccctattctgtctgacttatattcagtatcacagagtactaaggcgaattttttactgaatagcttttgagtaaaaccacactattcagtattacttattacaactacattgtatgactaagtagttgtggatgtcaactttattttcaaaaaaattaaaaatccgctttaccctaaccggatacagcctccttttttgttgtaagggccatcaaactagtaaaacagagctgattcaaagtgtaatttaaatcagctctgttttattgtttttataccgatatatcttgttttttcacgatacaaattgtttctcactaccattcccattgcatataaagcataaaggcaagtgcgatcagagaaaatttccagagattatccgtacatgatacgagcccctaaaatacaattctgttagaaatctgttctctatattctcttttattttatttctgatagttgattagcaacactatctaaaaatttttctaccttttcttttgatatatccggcgcatgataaccgatcgtaaatgtaagccttccattataagagcttgctcccattgaaaagaatggtgcatacataataggtgatgtcatatacccgtcctcagcttgaatttcaccaaactgaatagattcatcagcgattactcccaaatttgtcagtaacggcaatgccattcccatctgtacagcctgttcatattgctgattaaacatttccttcactgtagatagcttcatttctgccagtaactccattcctgctgctgaagaaagacctggattttgagactttattttatccattgattgtttaactcgaacaagagtctgcttaaatgtttcatcgtcttccattttaatcactggcatttccataccggataaattgcaaatagcaccagttgtattattaggcagatatcgacgtaaatcaattgtcaagccaatcattttttctgcagtgcgcggttctgcatacacagtgaaatgtgataaagctcggaagtatgcagtcatgattacatcattcaaggtagcctgttgagcttttgtccattgggttaaacgtagagtttgctcatggctcaatcgccgtacggacatttggggaaatttatttttgttaggttgagatggaaaagaccataacgatgcctgttgttcttggttaggacgatacgcactttttatgtccgatattccagcgtatttgaatacatgtaattgatctcgacaactctcatttccctcatcaaattcctttataatttgcttcttagaccgtcccaatgaaaggtgagtatatatcgttccaagcaatttaatatattccttgactcctgcaccatctgaacatagatgagacaatttcacaactaacatatctgttgtagtgccccgtaataatttcgtttgaaccataggcccctgaatacgatcaccaggttccttaataaaatctattgccattatttcaagttcttgattatttccttctgcaaaaaagcaaatagatgaattagtgtcagatgaatgttcctcccagtaaggaatatcattttctacaaaccggctgttcaaaactggttgcaattgcaacgttatccttactgattcttcaagtatttccttggatatacctacaggaaaataaagaactgcattaatttgttgatctgcagaataaagacctaatacataattcattcgatcttgtggtgttactgaatactttcttttctccataattccgtccccctttaggactttttgtataaccctattttccatatgcttataatttttctagtcatttttcttcaagagctaataacgcttatttttcgaatttttaacgaaatcatcttctccgtattggttgcattctttttgcaggtgatatattcattattttattgttattaacactgcctaacctcacaataaaaccaaacaataataaattaagtttacatatacgtaaacattttattataacgtctataaattatcaatatagcaaataaatcatttttatgtctgtcaataaaaaataatatattcaagggccacttcatcataaaagattgatgtgcatgtaaatgtacccatatcactttcaaaataagaatgagaattttttcaacaaaataagctgcagttattgattttacagtaagaaaagcccctccattttgaaaatgcgcaatcaaaatgagtagggctatttccaatttaaattttataaaaaaatgattatcataaataatattttactttttagtctaccttattattttcaatccattttcctaataaatgaatggattttattcatataatttgaggtggtatcgttggtttttaaaaatagaaagcttattttcaaatcaaatgaaaaagaggtaaaattatagatattcatgtagaaatttcgttttggggatacttaaaatcttaaggtgatgggcatgtggtgttacactttaaaagctttataaaattataaaatttatagatatagcagattttctttattaataatcatttgtatgtacgtttactcacatacatacaaatgatttataaagctacaattaagtgaaaacatcttttccgttacgataacatcatagccatgtcttctgctacatttgtaattagttttaaaccaaatgtttcttgtaatacatcaagcacgccaggtgaaataaattcaggagcctttggaccgatgcgaatatcttgaatcccaagactaaatagcccgagtaaaatggcaaccgctttttgttcaaaccatgatagcacaatacttactggcaattcattcacttcacattggaaagcatcagctaaagcagccgctattttcactgtagaaattgaattattgcactgtcctaaatcaatgtaacgcggaatttccgtaccaggtacaacaccgtaatccacatcattaaagcggaatttcccgcaagaagttgttaaaataaccgtttctggcggaagtgacgttgctaattcacgataatattctccgccttttcccggtgcatcacaaccggcgataacaaagaaacgctttattttcccctcttttactgcatcaataatttctggagctaatgataatactgtattatgatgaaaccctgtcactaactgttcatccgactccatatgtacttctggaagttctagtgctttttgaattaatggtgtaaaatcatcattttcaattttttgtacaccttctaaacctgcaatgtcatatgaaaagaatcgatcagagtacgatcctttaattggcataacacagttcgttgtagctaatatggcaccagtaaatttttcaaaaaggcgtctttgatcataccatgccttaccgatgtttccttttaaatgtttatattttttcagctgcgggtatccgtgtgctggtagcatttcagaatgtgtataaatattaatgtcttttccttctgtttgctttaatagttcttctagtgcaaataaattatgacctgtaactacaattgctttaccttctacacgattttgtgtaatttgtacaggctctggcacaccaaaatgattcgtatgtgcctcatctaataattccatcacccgtaaagctgatttccccactttcatagccatatcaatatgctcttgttcgttaaagttagaatttgttaatgtcatatataaagcttcttgtgttgtagcatctacaaatgcatccgtatatcctagctgagcagcatgtgtgcgataagctgcaattccttttagcccaaacacaatcgtatcttgtaaactcgcaatcgtttcattcttgccgcacacacccattactttacatccgcctgctggcgtttgttcacattgataacaaaacatatcatcccaccctctctcaatcattcattacaccttaagcataatacccattgaaaaaaagtgatgtgatatcaatcacaataatatataaagatttgtgacagttcatattgttgacataatatttttattgacactaaaaaatatgcattagtgtacacacatctttcgatacttttaaatagctaattaatttggagaaatatatacaacgaaaaaaatttttgaatcccatgtacaaatagttgcaattcatcacatatgaaatagatataaaaatacgctcttctttctatcattcaatagaaagaagagcgcatttgtcattttaaggaactatcattttttattaaagtctttattgtaaacctttttatttacaatacatttacattatcttaacattacttacattatttatatgatatatttatatagaagctacttaagaaatttcatatacattttatctttatgatctcttatctaatcaataaaaagatcatgttatatttttataacaggggtgaattacgatgactgaaactttaaaaacacttataatgcttgatgctacttatgttgttatagcaattatgacagtactagtatttgtatacttggaattaaaatctcagtaatatatgctgacgtaatcaacagattcagcatttaaatatagttagaagaaagagaggagaaaattatttctcctctcttttgtatttctacaatttcttattttaataaatccaatgtatataaaagtaatcctttgttccctacttctccatgaccaggcactactacatttatatttctatatcgcttcagcacattctcaatcgatgtagaccattcatttacataagcatccgcaacgtttcctaaatctttcgcggacgtagatttcactaaacagcctccaactaaaatattgtattgcggtaaccatacgacaatattatcttctgtatgccctttccctggataaaatgtttctactttcatatttccaaacttcaaatttgtaacggtttgtaaatctccaagtggctcttcatatccacttttctttgctagttctgcggttaatgctgtactatgcgctttaattcctctttctttcaacgtttttattccgccaattcgatcagcgtgcgcatgtgtaataatgacatccgttacacgcttctgaaacttcttttctaccatttctattagttccttcgttaatttgtcatcccaagaagaatcaacaagtactaaccctttagaagtattaagaactagaccgttcgaaggaactgcttctccattaaaagaacctaactccgtatgaacccatacattcttgtttaactgagatattgaaatggttcccgtctcattttttattactgttttctctaccttttgtgatgcttgtacagaagaaattgtgctaacaaattgaattgttcctagtaaacctacacataatcctacttttaacaacgtattctttttcatgtcatcaaccctttccttcaagccaaatagttattacctatattagacaatttatcttcagtgtttgttccatataattgaacactttataatcgcggcttatgtaaatacacgcatggtgcagtaaaaaagatcacccaaatggatgatcttttttataatttatcaacatattgcttcgcttctagtaaggaaaaaacaaaaacttctcttactctcttaactgctgtaacttttttgccttcttctacaagctggcgtagttctttattaatttcaggttctctttctacaattcccatttctttcgtaattaattgtaatctatcttcaattctctttaaacgcgcatcatttttcttttcaattgtagctaatttttcagcgatataaatgaaaccaaaggctaatattagtataaccatccagaattccatgaatgttcccccttactaactttcatttgttttatttcactaacttatcagctttagttattgaaatcattcattccttacaaggaaagggcaaactaaaactttctcaaaaatttgtactagacatgatttctcctcaaggttgctcaaaatggactggattaggtgtttttctagatgattctaatgaagaattacagatttattcactcggatggggcgtcggatttcaatgtatgatggtttgttatccatactgcgggaatggtgctgttattatgaccaattccgatttaggtgttcatcaaatggaagggatcattggtgaggttgtaaaaacgttatccttatatagataaagaagctgttccttccagcttctttatctatataacatttttcgcaacaatttttatatgttctggtgcgataatttccgttatactttcttggaaatcttcccgcaacatttcttccaaatgttctaactgcacttcaacatgtgtgcattctaaattatgtatatttaacagtgcataatgatcttttttcttaattactaaatattgattttcctctgtcacaagtacagaacctaatcggactcctaataagcgttgatcatcaaacttcataattacttctccttccctcatataaacaaaactacaatgaaaataattacatttatggaaaaacacgcttatttagactatatcataatttactaaaatagaaatatctttttctgtttcaataaaaatccctattctttcatatatttcgatacaaaaaactttctcaacattaaatttgaattttcagtttttaattccgtaaaaatctattataataaagttaataaatgtttgacctctcctaattcatgtacatatggatgatcagtagttatcgctactgatctatttttttgatttcagaaagtacatacgctgcatcctttcctacaccacaaataagtgcggaacccctttgagattgccatggtaaaccgatataatacaatccttttactggactgattccctttatatgattaggaaatcctttctcattcactgcctgttcaatttcaatccaattataattttgtacaaaaccagtttaccataaagtaaacgctccttcattctatcttcccagtctttagcgcctgtgcccagtcatatctttcttgttgaacagccaatccagcagcttcttcccaattataaggaactgaaatttgttcaattgtccattctcccaaaaccttttctatcactacatattttgcatgcggagttcctgattccattttatgcataacaggtaactcatctttgtatgctggaagtcctacacttcctggatttataatgatctttccgttcgctaaataaacaactctaggaatatgtgtatgaccacatactattattttttgttctatattttggagttgatccattatatttttttcattctttaatattgcaccattctcatttatctcttctaacaaatacacttcatctgaagttggcgtaccgtgacaacataacatatcgtctacaataaattgtgaaggatgttgttttaaccaatctatatgatcttttgttaattgattttggacaaaagttagtgtagcagactgctcttgtattgtctcccaaagcatgcgatcacaattacctttaatatgtatcatctcgctactcattaatatatcgattgtctctaaaggatctaacggcccatacacactatctcctaaatttattatcatttcgaccttgcgacgtgtaatatcttttaataccgattttaaagcgtgactatttccgtggatatctgaaattatagctattttcatcttaatccctactttaatatattatttataaacatccgcagccaattcccgcaaaacttctacattcactacttcaaaacaaccattgtttttgttaattatatttttatcacaaaagagattcaaagtacgtaataaatgccgataactcgttcctaacaactccgctatttccgttaaattcccactaaacacaattctattttcatgctgaactgctcgttctcctgctgctaacatgtaactcgcaagtctattttcaagcggatacaataaattaattgtactgtttttggaaagtcggtttaatttatgtgccaatgatccgcaaatacatcttaaaaatttcgcatcatgaaatagcttatttctcacctttcctaaaggtaaacccacacaatacgaatctgccatcacttgtacgtttgaagtgattctttgagaatgaattaactccacatctccaagtaactgcaaactatcataaaaacacagtaatacggatttcccattacttaatgtgttaaacgctttcgcttttccttcaacaaagaaatataaataatctatctcttcattttctctacaaataaactcattctttttaaaaaatataagttccatatatggcttcatatcatgactaaaaaatgaatcaatattattttgctttatatactccgctaatttaatagaattacatactttcttcatagttccccacctttacaactcatccccattgtaatcaaaattttcttcttccactatgacatatgtcataacaatacacaatttcagcatgatacagtcattacaaatatgaaatataaaggggatattacattgtataactttctttctgtctttattggtgtgctcatcgccgttatgcttccattgaatggaattttatccgagttaattgggaagtatacagcaagcgttgtcattcaccttgtcggtttaattgcagttatcttcattttaatcataaacaaaaataaaattcgtttcgataaaagtattccactttttttatatagcgctggagcgattggagtattcactgttctttttaacaatataagtttctccgtccttggtgcttctattacgatcgcattaagtttactcggtcaatctattgcttccatcattatcgatcatttcggcttattaggaatgaaagttgcaaagtttgaaaagaaaaaactaattggattatgtttcatctcttctggaattataatcatgacaatttattaatgggggcaagaaaatgttatatattacgatcgctattttagctggtgtttctatcgttgttgctagaattattaacgcgaatttagcagcaaaaatcggaaattgggaaggcacgttttttaattatattactggattatttttctctatgttatttttaattttcagttcagattcattgtatattccaatgcagacgttacaatctattcctattgctgtgtacttaggcggattagtaggcgttatcgttatttcattatccaactatattactcctaaaatatcagccttttatttaacattactcatctttatcggacaattatttgcggggactattattgatttcttcctgacaaatgaactctcaatcggtaaagttatcggtggcattttcgtattaattgggctcacttacaatttactcatagatcgcccgataaaaactgtgaagcataaccaagttcaactataatactttacgcttacctatcatatattaatagaaaagctcttcacacgaaataatagagaggagaaaaccctattaaaaaaattattttattgctaggtagcgtattaattatttgtggaattgtatggtttgtaaactcgggaaaatctattcaagatctctatactgcaaacaaaccgaaaaagaaagctactattatttcaagctcgcgagatccaaatgagccccctgcttttttaggaaagcaggaaataaaagatatacatgtagaatcaattaaaacaaaaaaggatatctttctcacaaaaacagatgaattaaaaacatttattaacagtatgaataccgcaaaaaaaggcaaattaacattggatgaagaaggatcagatttaatagattgtgatatgtggattactttcgaggatggaacttataaaaaatatttcatatgggtagttgatcatcacagcagcgaagtgatgattgctcagcaagatactcctgatgatgtaaaccttacgtactatcagttaaacgaagatagttcaaaaaaagtttataatttatttaaaaaaattatttaaacgaaaaagtcatgagcacgcgaactcatgactttttgcactatatatattccgggaacactctacaactcttttcctgctctatatcatgaccaaagaaaataattggtttctcttttttcacaacttcttttaaacgtttaattgaagataaagctaattctggatcaaatcctgcgaacggcacttcatcttcaaaattctctttcgtgtacgatgcatcaatcgttaataaaactgaaccggattgctccgtctcaatgaatagcgactgatggcctggagaatgacctggcgtatacaataattgaacacctggtaccacttcataatccccttcaataattttgtagttcaaatgcggtaatatacattctttcatatattcttctctatgaagtgctgcctcatattccgttcgctgcacaataattggtgtatttgtaaaagcaccgtttcctcctgcatgatcaaaatgtaagtgagaactaataatatataaaaggtcgtccggctcataccctacacgctttaatatattcacgattctatcttcttcagtcattttcggtaagatctgtccttcaacaaatgtaccgttaaaaagcccttcattattaactgcactttctggcatacctgtgtctactaaaataggaccttcttccgtctccaaaagataacaccacaccggcaagtttaatagtttccccggtgttaacgcactgttaacagacgaatgatccaacatgcaacgacctgctgggatgaaataaagtttctttactgtcattatgtatccacctttacatttagttttggataaagtaatacagtaaaaaattcttctttttagaaataaactccttctagactatcagtacagcttgcataaaaaaaagggtatttttttacatagcagtatttcaccatctataatatagaagtaaagaattcttactttaaatgaaacattaacaccgattaacgctgaaaacttaaaaaaagcacatgcactacttgaaagcgggcacaccattgggaaaatcgtattagagaaattttaatcatgatagtgataggtagtatgtgaaattatattaacgatttttcgaatatatctatcacaaatcaaattatatcaacgattcgacaagttatatcgatttatcgacaaataacaacaataagaaaaggctgttccagatgaacagcctcttctttatttacttgaaatctctttattattttgaacgtctaacggagctcgctttcctattccgaaagcatagaaactaattgtaacgatagctaagaaaataatacctacaactaatgaaatgcgtgtatcatcgttaaaccacattccgattaataccataattaaaaaggcaattgttaaatagtttgttacaggagcaaatggcattttgaacggatgatctttcatctctgctcccttttctttcctaaaacgaatttgactaattaaaatgacgaaccatggtaccataccaggaagtacactcgcactatatacatatacgaataagtttttcggtgcgatgtaacttaaaacaacaccaaccgccagaccgataattacgccaactgtaccaaataaaggcacaccatttccagaaagtttcgtgaaatatttcggtgcttgtccatttacacctaacgtatacagcatacgtccagcactataaataccactattacaaccagacattgctgctgtaataacaacgaagttaataaggccagctgctgccgtaataccaaccttcgcaaaagttgctacgaacgggctaccaattgtacttaattgatcccacggatacacagttacaataacgaaaatagcaccgatgtagaaaattaaaatacgccaaattgtactttgaatcgctcttgtaagtgtcttctttggatccttcgcttcaccagcagtaataccgattaattccacaccttgatacgctccaactacaagtgataatgcaaagaagaatcctgaaaaaccacctgtaaagaaaccgccatttgaccaaagattagatatgccaatcgcttctccgccgttaccaattccgaagaaaataaggccaaatcctgcaataatcattaatagaatcgtaacgattttaatcatcgcaaaccaaaattcaaattcaccaaatgacttaacagaaattaagttagctgcaccaagaataaccattgcaattatacctggtatccaagctggtaaatccgggaaccaatattgcatatacgctccaaccgcgataatttctgacatcccaacgataacccactggaaccagttactccacgctgtcatataaccagctagtggatgaatatacttatgaccgaatgtcgcaaatgagcctgtacttggctccatatacaacatttctcccatggcacgcatgatgaagaagatgaaaatacctgcaattgcataagcaagcattactgacggacctgtccatttaattgtgctggctgatcccataaacaaaccaacaccaatcgttccgcctaaagcaatcatttgaatatgacgtgcttctaaacctcttttcaattctttgtttgccacttcacttccccctcttagatgattcatagccgcattttaacacaagatgctttcccctaactcctttcggccctgaaaatgatgaagcaaacgtcattttacactagctttaaagctatcctaaaatcgttttgtgctcctaataaaattctcaaaacctttcatcttccaatattctataaatcttaaaattacttatcttatattaattcattaatctgaaaaattcaattattttttcaataaattattatacataagtctgattaatttttaactaaattaacaataaaatacatctattcaatatgattccggcatgtatattattacaatataaataaccgaggagatgctatcttcctcggtttcatatctcaaatacttcaacctttatagttgataacgtaatttcccacacattcgattcatataccaataagaaatttaatatattaataaactactaacttctttaccccagccaaattttgaggcagaaacctttctgcctcaaaacaacgggataaaatataaaagagtctcattaaaaaatgagactcttttacaatttcatatttaaatcgatttcgaagtttgcttaccaaagataaataccctagtaaacactgccattataactacaataactagaaaataaagtggcatcaccagtaacgagcccgtatgcaattgactcattccccaaattgtcatcgttacaattacatagtatcctaagctaaacaacgctccagctgtaccaatgacatcttgaaaatctactaacgctaaacttaaacaattaggtaacgctactccaattcctaatagcaatataaacatcgctattaaaaatacaaccatatatattacattcggatttgatcccacaaacgtaataacagataaaaagatagctcctcctgtcattacgagacaaccgatatatataattttctctggtttataagtagcaagtaaacgttttgaaattttcgctccaacaatagaagcagacgctacaacaattcctagaaatccatacatactaggcgataattgaaaatattcaataaagataaacggcgcttctgcgtaatagctaaataaaacaccatttgctcctccaattaacaacccatatgttaccactttcggatttgtaattaacctcttcaagactgaaaatacatttattttattcgttactgagcccgtttttgtttcaggaagagaaacaaacgtatacagaaaaataccgatactcataactactaaacttaaaaatactattttaaatccaaacatttgatcaagaaagccaccaattaacggtcctatcgctggtgtaaaagcaatgactgccgagatttgagcaaacataacatgcctcttatgcccttctacactttcacgaagaatcgtttgcgtcacaactgatcctgcacttgctccaaacgcttgaataaaacgacttaccaataaaacttcaatggaatttgcaataaagcacaagaaactcccagcgccgtatacaacaattccaaataacattgcccagcgacggccaattatatctgatagccatccaataaaaaatacacctaaagcaaatccagcaaaatacacactaagcgttaactgcacctcattattacttacatgtaacgcctttgaaatgtccggtaaagacggtgtgtaaatcgtttcactaatttgcggaaatgcgacaagaataatcattaacaaaagtgatggtactgagacttttttcatttttcataccctcctataactttgaaaatctcagaaataaaaagactttccttagctacggaacaggaggggccattatagaaatccggtcataaaacaacaaagaaaacacctcaattacgtatgttaatacttataggagggtaatattaacatcgatttttaaatatactttttcaattatattacatattaattttatttttctagtattatcatttcgaatgctctttttatattagtgaacaaataataaacgccataaaagataacaacttgatatgaacgccttattatggaataattagaaatagtttgaattaataaacctgattataaaatgatagactcatatattcctaatgtcataaagttgaacaagtaggaggactttcgtaatgattgaaattttaaggacagtagtaaacttcctaatttctctattctcaggagaattaccctttgtgtattatgtatggattattaccctattcctaattcaaataatccaatctactctgaactataagctttttaacaagaaaaacaatttcagcacttatatatcggaaggattacttgcttttattattttattgtttggaggaatattagtatctaagttacttgcttacataatagacgattctactattagtatgacgaatttaacacattattttgtttctcttatcatattaactatatttgttgtaataacctgtgttaaagactttatagaggcatctataaagaataaaaatatatctcttttgagctttttagtaatttccttcataacaagtatactttcattcaagtttttatcacctttaattgaaggttctttttctctttctaaatcttttataactactttaatcattctagtaactatatcaatccctctattaatttccttagaggataagtatgcagacgaaaaggaaacggaaaatttatagtttctcatttacataaaagaaagagggagctcccctctttcttttctatcgttctatttcacaagactaaatcattccttttaatattaatcctaaaactgacattattatcgcgctaataataattcgcaaaatccaagtagtgtttgtacttattttttctaattgcttattgattgttgctatatctttctcattaatagtggtacgcgtttctaaatttcgaatgtctctcataatttctttttgctccgccttgagattgtcaattttagcgtaaacatcttccatatattcacaccctctgttcatcttaatagaaaaatctatatatattatgagacaaccctcttatctgtgaatacgttgcgtatatccgcgtaccaaattttttgtacaatctaattgaattactcacacgtttccattcttctatttataaattagcgttgagatacattaaaattagaaaaggaatcccttgtttatttaacaacaaacaaggtgcaatccaccattcgggagcacctacgataatttctattgttttcatatttacaactccatataatcagtatgattttctgaagaagccaatttttgaactgcttaaagtatactaatatgaatacgaaatagctgtattgataaactctctagaacaataaatatactggctgaaacggatctatatccaatattttttccagtaacatgaatggttatttctgataaatgcgtttgtacatcattgttttcaaaaatttcatcctcaacctttacaatatctgcttcacaatctacttctttaaaagttttcaataattttgtttccaataaactacaatcaaagctctcatcttttattacggcaaatttaaccttcatatcgatttccccatttttaacaaactaaaatcactaaatcaatataaatatatattattctattaaataattcaaaatatacgcttcttatatacattattaaaaataggttctaaagaattaaatgaaaaaagaaattacatatacaaatcccctctttcaaccaatcaatatagaattcccttatgcccaatgattaaaatcttttcatattaaagccgtagattctaaggactttttgtttttatattgataagtcatttcttgaattttgtatcatcggaattaataatatagtaaaacaaattaaatattaggcgttcaactaatctttcatataattcgtctcttaattattttgctcattgcgcttttttattttcctcactatttcaactaaactttgtgtaataatacatatttcaaatacattatttcctttcactcatacttttatcattgagtttttattcacaaattcgtaacacatatatatgagttatcatgctaaaattagtttattcacaaaaagaagttcttcttaataaatcaatcatttttaataccctgtttaaagccttgcccccctgcaaggttttttcctatttaaatagagtagtagttttcgttatgcttctctcccccttgttccttaccctacaaataatacttcatatttattttaatttttcagcatccgtactcgctctgttcgagagctctttaccaaatattcaatctaatgataagattgaccaaattaatattttcgtccataactgtatcaaaaagtacactaaagaaaaaatagcactctcacaattaagtaaacgcgagctttttcttctatctacttactatttaaggttaatagtgatataaccagatttaaaaattcgacttaaattcattgatgaatggagaggtttatatgaaattgaaagacaaagtagcaatcataactggtggtgcaagtggaattggcgaatctactgttcgtctttttatcgaagaaggtgcaaaagtagttattgctgacttttctgaacgtggaaaagaactatcagatgaattgaatgcacatggatataatacgttatttattaaaactgatgtaacaaaagaggcagatattaaacagctaattcatgagacagtaagtacatacggtaaattagatattatgtatgccaatgccggcgttgctgatgatgcaccagcaaacgaattatcctatgaaaagtggaaaagaactattgatattaatttgtctggggtattcctttctgataaatattcgattgaacaattccttaaacaaggtacaggtggtgtcatcgttaacgctggttcgattcatagttttgtttcattacctaccccaacagcatactcctctgcaaaaggtggtgtgaaactattaactcaaaatttatgtactgcctacgctaaatatggaatacgtattaatgcggtgtgccccggttatattgacacccctttacttggtagtgttaatcctgaacagaaagaatatttagcttcacttcatccacaaggcagacttggaacaccagaagaagtcgctaaagctgtcttatttttagcaagtgatgatgctagttttgttaacggtacaacacttcttgttgatggaggctatactgcacgttaatttaaaaattttgaagcaccctaagaaatatatagtcttcaacaagaaaaagcgccatcacaagtgacggcgctttttctatgtaagagcaactagaaggtatccttctagcctactcccatttataagtccaaaactgttcaagttgcagccattttaatgttgctgcatctttgttttttatttttgcatgcgtgtcttcaagcattgcttctgtttgtgaacggtgcgcacctaatgcagttaatttatgatcaaatacttcactaatgttatttacaacatccggttctcctaatactgcttcacgatttttcgtaatcgcaacagcatggataactgggcgctcttcttttggcatacgtgatacagcgcgaacgacagcgcggccaaatgcattatgatctggatgtacaccgtgctctggataaaatgtaataattcgagatggatttacttcttgaataattgcttcaattttgtcagcaacgaaatcaacatcttcaaattctaacgttttatcatggaagccaagcattcttaaatctttaatacccatcgcttcacaagcatctttcaattctttcttacggatatgtggaatcgtttcacggttagcgaatacgttcttacccatgttacgtcccatttgtcctagagtaccacatgcatacgttacaggtactccttgatctgttaataagcgaattgttcctcccgcagcatatgcttcatcatctggatgcggaaatacaacaagtacatgtctctccataagtttccctccttcttacttaaatggtgttaagcttaactcaagtgcaactgctagacgacctaaattatcatgtccagctaataataaacgctcttgatcgtctacttcccagtgcgtaataccttcagcatatacccaaccgtgatccattttcaaaccaactcggtatggatttgttccagttatcttcccgcgttcaaaacggataatcgcatttcgaatgaaagcaccaactgtcatcatcttttcatttatgtgtgatgcatacgctccgtttgtcgtttctaaatgaatatatacatctttatttacaaaacgttcaatttcattttgaataagagaactatcttttactatttccatcggaattcacctctttaaaccattttacgcaaaaataatgtaaattgctatctctatattagaggacaacgctcacttttcctaataatttgcactgtgttttttatatgatatgtaaaaaatacattttttccttcactttgttaaatagttttctttcttttttgaatttgctacaatatattttatcccgtattattgcagcgagatacatttcgacaattgaatacataatttaaagaaggtgacatgattggaacagtcagcacatgaagtagcaaattggcaatattattttgcaattgccgtatttttaatcacgtacggatttattatttctgagaaattgaatcgtgctgtaatcgcactattcggtgctgctattatgattatttttggagttgtagatttacatactgctttcacatcacatattcaatgggaaacgattacccttttaattgggatgatgattctcgtacatattacgagtcaatcaggcgtctttgaatttgtggccattaaagcggcaaaagcagctggtggaaaaccgattcgcattttattattactatccctattaactgctgtcggatcagcatttttggacaatgtaacgactgttttattaatcgttcctgttacattatccattacacgtattttaaaagtaaatcctgtgccttatttgatttcagaagtgctgttttcaaatataggcggaacagcaacattaatcggtgatccacctaatattatgattggatcagcaaacaagcatttagactttaacgcctttttacttaacttagctccaatcgtaattattatttctatcgtgacacttggcattatttacttcatgtatcgtaacaaactaaaaacaacacctgaacaaatcgaaaaactaatggcattaaacgaaaaagattacattaaagatcaaagcctccttttaaaatctatttcgattttaggactaactattttaggcttcgtacttcattcgattattcatgtagacgctgctgttatcgcgatgacaggcgctacacttcttatgttaatcggcgtgaaagaacatgatattgaagatgtatttgcccatgttgaatgggtaaccattttcttcttcgccggattatttgttctcgttggcgggttaattgatatcggacttatctcttcacttgcaagagaagtaatcgacgtaacaaacggtgacatcggattcgcagctatacttattttatgggtatctggcatcgcatctgcgacaatcgacaacatcccatttgtcgcaacgatgattcctcttattcaagacttagctacaggactcggactatctgtcgattctccgcaaatcgaagtactatggtgggcgttatctcttggagcttgcttaggaggaaatggaacactaatcggtgcatctgcaaacgtagtcgttgctggtattgcaaaacgtgaaggacatggcttctcttatatggacttcttaaaaattggtttaccattaactattgttgcactcttgttatcacatgcttatatatatttacgttatttaatgtaaaagttgtattgcatgaaattatatcgtcaaatacaaaaggtttgcagcatccgtgctgcaaaccttttttcatcaccaaaatataccgataattgctaaaccacctaaaatcataccaccaatttgtccgacaattgttggtgataattgaacaccttttctcacttcaacaactggtctttcgtgccttagttgctgcacttcactttgaagttggtgcacacttccgtgtaactctttaataagttcttttaattcggcgacctcttcatttactggttttgccttttctaaattcattttacatgactccttataaattcaatcaacacactgtaaattttcgccaattaccattatatctcctgcatactacatatataatttcgaatgtactttctaaccttgcagctctatccattcatcccgcaatatccccataatcatacggtcaaaacacttcccatctctttgaaccgcttctctcatacagccttccatttgaaaacccatctttttatacaatgcaatggcaggtttattatacgaaataacatcgagaccgatgcggtgtaaattcaattcatagaaagcatactttagaataagatgtattgcttctttcccatatcctcttcctctatcattcgcatctcctataccaatggctaataaacctgttttgttattccactctataccatgaatcgccacaaaaccaattaagcgatcttcttgaactgtccttaccatgaaagaaacactattcgatctccgtccttttaataactcatcacttgctatttcttgtaacgattgcggaaacgctacatctgtatcgacatttcttaaatactcactatcctcttgccacataaccattactacagcatctgattctctaatagcggataattttacaattttattttgaaaaagattcatcgtcatttcaaactcccccttttttaataacggggatacttattttagcctatttatccccttgttccataaactgctttataaacgggatacttacaataagcgctgacattggcacatctcctctacacgaaattaacttcattgtataatttttcgtttattctaacaataataaaaagccctccaaatttagagggcctttcctaatagcaaaactatattatttcgtaaacattttctctgcttcatccattgccattttgttacctaaagcagaatagtcaagccatggttggtcattgataatatatacatgcttgcctttaacagcttttaagtctttccaaattggtgtttcttgaagttgtttaaatgcagcttttgctttatcatctctatttacaacaacgaaaatcgcatctgcatcaaagtcaggtaatacttcttgtgaaatgacttcgaaaggacgttttccattgattttctctacaccatttgcaggttgtaatcctaagtcttggaataaaattggtcccatcggtcttttcgtactaaatacacgtaattcttttgcagtaacgcgaattgccattactttttcgttattacctagctctttatctattaaaccttttactcgttttgattgctcttcgtaatcttgaatatattgatccgcttctttctcacggtttacaagtttaccaacttgttttaaatggtctctccatgtaccttcatctaaattgaaagtatgcgtttttgcaattttttcgtatttcgctacatctttaccagcatatttttcatcaacataaatgtcagttggctttaattgaagtaacgcttccatattcggatctgttacaacaccaagcttcttcgtatctttcaacttctctttagcgtgcggtaagaaatcttttaaatctccaccaataacagaacctactggtgtaattcctaatgcaagtaaatcattcgttaaatgaatagacatagaggcgatttttgggtcattactttttttcgtttttttcgttgcctcttcattagatttcgtttgaccacatgctgctagtactaaaatacacatgatgctaaataaaatagtaagtttctttttcatatgttctcctctttgaagtatttattttgtttttgtaagtaaataaagaaaatacggcgctcctaaagctgccactactacaccagctggaatagagtttggctcaaatatagaacgacctatcgtatctgctagcactaaaataatcattccgataatgccagctagtggaaggaaatgttgatacgtagtacctactaactttcttgcaatatgcggagcaactaaaccaataaaaccaatccctcctgccatcgatacactcgcgcaagataatccaaccgctgtagctaaaaggagtaaccgttctttttgaacagaaacaccaagtcccgctgccacactatcaccgagtgacaatgcatttaacgtttcagattttagccatgcatacggagttagtatgaaaatccaaggtaataatgcaaggacatgaatccaatcccttccccacacgttaccaactaaccatctagaagcgaatgtatatgtctcatcatttaacttgagagagaaaaataacgaaattgcactaaagccagctgaaaccgcaataccaacgagaataagtctaatgggaagtaaaccttttgatcgatcactcgcaagtaaaataataagaaatgcagctaatactcctccgccaaatgtaaataacggtattaatatcgatgcattctcattaatagaatgaaagaaagtaacgaatataattagcccgaaagatgcacctgaatgcagtccaagaataccaggatcggccaacgcattccttgataacccttgcaaaatcgcaccggaaatcccaaggccaataccagctaacattgtgattataattcttggcatacgataatcgtacagcacggttgcactctcaaaatcaccatgaccgaaaagcgtttgaattactttgagcggtgcaatgctaagtgtccccgtatttaagctaagcaaaatgacagcgatactaatacaaccaaatattgtagttacagtaacggctctcgttttatctgtgtttaaaatcttcttcacttacaactccctcccaactttacgtgctatatagaggaagaacggaactccaacaagagccaccataattcctatcgccagttctttaggagggtttactgttcttgcccctaggtcagctaaaactaataacatagcacctaataatgctgacataggaataatgagtcgataattcacaccaactaattttctagcaatatgcgggataactagtcctacaaatccaatagagccaacagctgaaacagatacacctgcaagaatgactactataatcatccctagtattctcgttcggttcgtttttactcctaaattcgtagcgacatcatcccccattgatatgagtgaaatagaccgccctaaaattgtcgcaaaaacaattgttatgagaataataggaactaaaaatttcaagtgttcccacttaacccctgcaacaccaccagcgtaccaaaaagctaaatcttgacttaagtcataataaatcgcgacacctgaacttaacgaatgtaaaagcgcagccataactgccccagcgatcgttaatctcatcggtgttaatccgcctgatgtggccgatccgataataaaaatgagtactgtacttaagaccgctccaataaaggagacaatcattaaataggaatacggcatatgcggaaaaaaggcaaaactaagtgctactacaaacatcgcacctgcatttatgccaagtacacctgcatcagctaaaggatttcgtgttactccttgcataacagccccagcgaccgcaaaagccgctcctacaactgctgcgccaattacccttgggagccttaattcgtaaatgatttgatgctgcgttaatttcggattgtaatcaaaaaccgctgtccacaccgtttgcaaatgaatatcctttgcaccaaatgcgacggccaaaaatatagatccaattaaacatataattgttaagctcataaaacatatgaacttaatatgtatccagcggttattgccagcatgtatagtagacttatgtaacatgtttcatttcatcctttatatgcagttgttttttataattatttttaatttataatcattactgataataattatcattttcatttagatattatatcctcactttttttaaatagcaaactatttttttacttcgttaaatattaaaatacttattacaattcccttccaaaacttacaaatacacgcaaaatagaatactagcttatttttaaaagtgtagtatacttaatcattattttgagttttcaaataaaaacatccaaggtgatgcaatgttatatataaaacaactactctattttacttatgaacaagcattatcctgcttattcccagtcgttattttcttaacactagccctttcaaaaatcgtttcgatcccagggttataccgctacgatttcatactcatcgtatgccttcttatgcagtgggttatgtacaagactggccttgagacgaaagacgaattaaaagtaattactgtcttccacctcatcggccttttactagaaatatataaagttcatttcggttcatggagttatccggaagaggcatattcaaaggtttttggagttccactttacagcggctttatgtatgcaagtgttgccagttacatatgccaagcgtggagaagattgcatttacaaatgcatcattggccgaaagctatttttgtaatacctctaggagcactgatttacttcaattttttcacacatcattttctatacgattttagatggttcttaacgttacttctattcatcgttttctttcgaacatttgtggaattttcattacgaggcgttacatataaaatgccgctcgttctctccttttttcttatcggattctttatttggattgcagaaaacatcgcaacatttttcggtgcatggcaatatccaaaccaacgggaagcttggaatctcgttcacttaagtaaaatcagctcatggtttttactcgttgttattagcattatgattgtcacgcagctcaaacatttgaagcaatcaaaaagataatgctaattatgtaaaaacagttagcccatcaatcattagagagtgatgggcttttttttagtaatattttttaaaccaaccttatcaaaggagttataatttacaagagtataagcagttgcacattatgaactactactagcagaagatgttgctgcagatgaagcggcaatcgttgccatcatagcagcctgttgtgcttgtatgaggacttctatcattgtttgtaaacctgtgttggtagttttactttcctcacctttctgacttacgaacagttgaatagcaataagaatatttgtatctgtatgccaacggaacaatttatccccctgcaatttttcaataaatgctctaatagaatgaatctctttttctccatcctcgagtaacgctagtaacccgatagctgggtaatgcatctgttttacttttaccttttcttgctttaacaaattccatatatttgtgcattttgcgactaacagttcttccctgacatccttctttagtgaaagaatatgactcaaaaattgaagatcattccctttatgcaaaccagctgtcgctagtttctgataaaggcgttccactcggtccataagtgtgtctacattctctgattgtcctgctaataaaaccgcgagcggataatcatttgtacttgtaagaaagaggtgatcctttttcatgcgtttatatacttgcattgagcgttgaatgtgcgcgccatgctgttcattttcttctgttaaaagtacagctgctgcgagataagtaaatatactgcggctaaacccaccagtgaccaattgttcatataaatctaaaaactcccgaaaagctttctggtaatctgtaaagtgaatatctaatgttgctgccactacaaaacgatgataagactttaagtatgaaaacatccctacctgattcttaatataactactaatttctaaaaaacgtccgcgatcaaacagtttatcactacctgcatacatagcagcaatcatcattcctgttcgagaatcgctcgttttccattttagttctccctttaactgtacatatgtatgtttatattgctccaacttttgctctaatgtaatcatagtattcacccctatttctagttcttctctatcattatacttatattccatatttaggaatactacaattaataatcacaccataaaaattataaaatcctcttatccttcttcatcagcatcacgatgatactccctaatccttcaagaagttaaacaaaaaaggtagataataatttatctaccttttttgtttatatcatttaacattacacctgtattgcttgttatatgcaattaagactaaagagctttaataatacgttccatcgccttcatttgtccaatatgatcagcttcatgataaagcatcataccgtaaagctcaccaactgtttccaatcctagaaatggctctggcagtttattttcaaatgcttctgctggaatttctttaatacgttttgcttgttcttttaattggaccgttaacacttctaatgatggtccttctgttgtccatttagatggtcttgatccatatccaaacatacctggatattcagttggtaattgtttgaattcttttccaaacatgaaaacttctgctgccgttaatacatgaccgatatgccaacgaattgtattgttaaaaccctctggctgcgtatccacagttttatcatctagcgtctccataaatttaagtaatgccccgcgcgttatttcaaattgttttagaccaattattctattcattttatcgttctccttcttcatgtacattttattatgaactaagaatgttcaattcattaaagtttcactttgtttaatctatcagaaacaatgaagaaatacatctaatatgcttagtaaaaataataaaaaggttcacctctcgtacatatagaattacttattacacaaatagtttagtaaataaaagaggagtgttaatttcatgttacatgttttaaaacagcaatataatcttattagctctacaagagaaactctattttcgtttttggaagaaatcccagtagaaaaattacatagcacagttcctaatttcgggagcggtagcattataaagactcatattcatgtagccgattgctaccgatactggcttggatcattcgcatttaaacaaaagcgagtagacttttcatttgctagcgattacgaaattgagcatgcagatgtgaaaaaagttcgcgctagatttaagttagtagatgagactgtacaacgttttttagatgaatacaatgaccgttggctcgaaaatattgcaaatgaagtaaagtggcaaaaagggccttggagtacaactccgctatggcttttaactcatacggaaacccatgagtttcatcataaaggacaaattgtatcaatggccaggcaccttggatatactcctcctgatacagaccttagttaatacattcatgttcatttcaaagcggaatgggcagcaagaataatagtatgatcaaaaaactcgttgatacattttgttgtgtataaaacttttattatttgttttaggtataccataccattataaaattcatgtaacatcgaattaaggttcatattttttatgtaactcattgaagaaagtttaagtatttatacattcaattactaactaaaggagaaaattataatgagattagagagcgaaagaatttatttaaggcctctttgccagctagatgctcctattatattagaaagtacaatggatgatgaaataagatatatgactggaactaagtccactttttcattggagcaaattacgaaacatatagatcatataaataatgattcaagtcgctatgatttcgctatttgtttacaaagtactgacgagatgattggagagttgtcgcttttagatatcgatgaggagaacgaaagagcaggattcagaatatcaatgctttccatagcattaacaggacaaggttatggaactgaagctattaaaatcgttttaagatttgtttttgaacaactatcattaaatcgtttacagttagaagtatttagccataatttacgcggaattaaagcttatgaaaaagttggttttgcaaaagaaggaaccttacgtcaatctttattttataacgatacatactcagatgaaattattatggccatacttaaaagtgattatatagagagacctttgtaaatgaatgtacttaatctattaaacaattttaaagaaccttaccacaataaaatgcagtaaggctctttcatttttatatcaaataacagctcttaaaacatgtataatcgtatcaataccaaatagtctccgcataattatatgcatcactattcggaattgcatgtttcccctgcgcttgtgcttttcttggatctaaatcatataccattggcgtatagcatgatgtttgccctttatttacaacaccatttcctccagcacttccgcaagtgtatgcctttccatctgtttttctaacaatccttgcatcagcttcattattataagtaacttttgcccacgctgttttacacgtcgtgctaaattttaattccacataagaatttgaatcaatccacttcttttctttcgttactgctgattgatcacaactattgtaatacggacttttcccatcatacgaatggtcttctgcaaatgctttatcattattggtcgtactaaacacactagttacgacgagcaatgccagacaaagacatgcgcttacctttttaataagtttcacaggattccactcctttattaataacgtccagttttcccgtaaccattattaatcgtcactgcttcggcatcagctgtataaccaaaatcagcagtcaaatcaaacaccattcctgtataagtgctcgtttgccccgttttaattgctccattaccactattagaatctactgatttttggaatacaccatttttatatttattaataacagcgtaagcatatactcctccagaaacagaaggtgctggttgatctaaaacaagcttagaccatgccgcatgacatgtattactgtaacgtaaatacactgttcctacttttttactaccttcataaactgctgtagactttgcattaaatccatctgcatcacatgttgtacttcccccgtatactttcgttgttgctggattttttccgtcataatagctactcagatcagtagctgcaaatgtactttcttgaaaactaaataatacccctacactcgctacacttaacacacatactttcattaactttttaaacatttttaattccccctcaaaatgattatgtatactaaacacaacctatactgctgtgtcagccctccttccatgcttcctagaggcatcttacaaaaacgaattaacgttgtaaattcccttatgattattggaatatacgaagaactttacttatccttgtaagaaaaaaagttgagaaatacacattttatagcatcctttatttaaaacataaaagaaccgatacttgttatattcaagcatcagttctttatacaaaattgccattttttcttttatataaaataaatatttctccacttaatttgttgtaaaaaactccctcgttacatcaataaattgctgcagtggtgctgtcatccatttatctttatgccaagcaatttgtgtataaattggaggtattgtttcgtttaacattaactcctttaacgtcccttcccgtatatctttttctactactatcgctggtaaaacggctatacctaaatctgcaataacacattgtttaattgcttccacactaacaaactcaattttatttgctggatatagatcttccccgcgaaatagctcttcaaataaagttctatatgagcagcctaattctgttaataaaagtgtttcactctctaaatcttttatagaaacagtagtctgttcaagtaaaatatgccctggagcagctactacttttaattcttctttcataagtggttccacatgtaaaacatcttctgttttacattcgtccaaaataaatgcaagatctacttttccctccatcaattgttccttcgcatctttattggaatgtgctggtttaaatataagctttattttggggaattgtattttaaacctctttaatatagaaggcaatctgtatgtacattgactttcttgtgcaccaattattaacgtacctgctatttcctcatcatctttcacggccgtctttgcttcgttactaagtgcgattatcttgtctgcatatagttgaaactttcttcctgcttcagttaagaaaagacgtttccctaatctctcaaatagtggtgtaccgagctcagcctctaacgttttaatttgtgctgtaacgctcgattgagcaaagtttaatttcttcgcagtttgtgtaaagttcaaagtatctgctgctactttaaatgtaattaattgttttatctccatttatcatccctctttttcaatcgatatttccgattgatttcatcgaaataatcctctttgtctattgatatttatattgtatgataaagagcatcgacaaacaataaaatggaggtattccatatgaaagcactttgtttcgaaacattcggagatgctgatgtacttcaatataaagaaatccctgatccaatcattaatccaaatgaaattcttatcctcacgaaagcaatcggtctaaatttcgcagatatttatagacgccgtggtgattatcacctcgctggtaaccctccttatatattaggttatgaaggcgctggtatcgttgaagaagtaggtgctaacgttactactatcaatcctggagaccgtattgcatttgctgacgttccattcgcaaatgcagaattagttgccgttccagcagaaaaagcaatcccgcttccagattcaatttcttttgaaacagccgcttctatcttattgcaaggtctaacggcacattatttaacgaaagatagctatcaaataaaacaaggtgatacagctttagtccatgctgcggctggtggcgttggtcaacttcttattcaaatgattaaactactaggcggaaaagtaatcggtcttacgtcatcaaccgaaaaaaccaaagtagccacgttagttggggctgatcacgtatttttatatactgaaaaatggcattcaaaagtacttgaaataacaaatggtactggagtaaatgttgtatatgaatcagtaggctctacactagagaaaagttttaacgctactaaaatcggtggtactgtcgtattttacggaatggccggtggtaatcctgcgcccattgatccacgtatgcttatggatacttcgaaaactttaactggcggagacctttggaacgtacttactacttttgaagaacgtaagcagcgctctactcaattatttgattggatcgctactggaaaattgaacattgcaagtcctactacattctctttacaagacggtgcccgtgcacatgaattattagagagcagaaaaagtactgggaagattttattgatcccataattcataaaatgaaaagaaagctagattaaaattttgtgaagacctatagtgaaaaaaattgataaatgaaaggacataacatattttatataactaatatgttatgtccttacttcttcaaataacgatcccatgtatcactcgaataatttttgagctcttttctcaattaaaactccctttaattgcatatgttcttttatttgtatattgctagaaaattatcatttttatttatgaataaggctacgtaccgatttaagctaaaaactagattttgatcctataacaacagtggcatctaattcctcatctctagtcactttcgtggtaagcccagcaccagcaaagatttcaaaagtctgagttgcctgcatttcactcgtctctattaaaagatgccctcccgatgcgagccagagaaatgcttcttttgctactcttcgctgaatgtcgagtccatcctctcctccgtctagcgccattttcggttcatgtagacgggcctcctgtggaagcagctttattgtctcggtaggaacataaggtacgtttgcaactagggtattcacatggcctttaagtgcgtgaggcaaagctttatacaagtcaccttcaaaaacatggccaccgaaatttgttacgttgcggctagcacatcgtactgcgacaggatcaatgtcaacagaatacaattcaattcgtcctaaagctgccgccagagctacacccacagcacctgaaccgcaacatagatcaacgacgatatcaccaaagcataacagagcttctgcttggcgaacaagaaactcggtacgttgacgaggtacgaaaacacctcggtccacttctatccgcaacccacaaaattctgcgtatccaacaacatattcaagtggcaaaccattggctcgcatttccaccattctcttgagctcctctggagttcgggctgctgaaataagtaaccgggtctcttcttctgcgaaaacacaacccgcgctctgaagtctgttaattatacatttttccgttttattgtccaaaaaggaattacattcttttcctatttatctcaccactttttcttatttataaccctgtattcgctaaaaattggatgtatcctttttaacaaagtggtcctattcaaaaaaatacgcccttattcaattaaatgacccgattgttgaacaaagaaacgttctacacaatagaaagtttcattataatatcccaatataaccttataaatgatgcactaaaaaataaaaaggaagctagattttactaacttccttttcttatatctatttaagatagtattatatttccacactttctttcccttttgcaacataactcatatctccaaccgactccactgtgtatgttccatcttgatatacaatcttcgtcacgctagcattttccactccaagttttgttttgctactgtctaacatttctattaaggtagtaatcaaaagcccatgaacgacaactaagacgttaccgccaccattttcagcagcttcttcactaattttatctatctctgtttttatacgagtagaaaacaattcccaatcttccgcctgttttgtcggatctgctactctaataagattaatcacttcttgaatagaaagcttcaagagttcttctggtgatgcaacgcctgcagcttttccaaccacatcccacatattctcaagtttttcaccttcaaaaataccgaaatttaattctcgcaaatcttttctttgctcaagttttaattttgattgctcactatattttaatactaaattagcagtttcaattgcgcggccgctatcactactatacgcattcataaaatgaatatcttttaatcctgttcctaaatttgtggcaacttcaacacctctttctactaaaggagaatctgcccaaccttgcgcgcgatgattcgtatttaatattgttttaccgtgtcttgtaacatataacgtcactacattctcattgctatgtgtttctcgcttattcatttcattctctccctttacgtttctatatcaattttaccacctcaattattcattgagcaaaatatacgtcagtagatccgcttaataaaaaaagctatctttctgtatatccatacaaaaagatagcatcttttatgattacatttcttaaccggtactcctattcagcaaaagcactcgaatattgtacaattccttctacacctcgaagagaattttctgttaattccattatcataaatacctcttcaggcacttcaaacggtgcttttacattccactcacttgctttcttaaaaccaaatttcgggtagtactctggatgtcctaatactacaactgatccgtatccaagttgtttcgctttttctaaagcagccgtaatcagttttccaccaattcctttcttctgatggcccctagcaactgaaactggtgcaagtgctaacgattctacagaagttccatcttgttctatcgcaattttagataacataatgtgaccgactatttcctcatctactgcaacgattgataactctgaaataaatgcgtcacactctctaatacgttttacaagttcatgttcctttttatcactaaactcttcatgtaaaaatgcttcttttacaacttcttctgtttttctataatcatttttttgttcttgtctaatcgttaccattttaacttatcctctattctttcttatttctttttgaattttacgaagtgcttttttcgatccgcgctcaatatcgtgttgcatttttctctctttataatcgacaaatagtgtatttaaatcgtatccctctggatataactccttcgctgctacctctaaagtaatacgttttacatttacttcaacgaattcaccgttataatatacaacgacgttataaaaattatctttttccttatagatgataccaaaatcatcataatctaataaattcacacgatcgccgattttgtactcataatgaaattctcttttttcttgtacaaatttcggttttctaattttactttcattcactttttctaaagcgtactctttatttcccatgtactctttcgctcttttcagcacatgttcttttacgctcattttattcgcaatccaaagtgcattactttctcctgattttccgataactaatttataaagcggctctagcgtttcactattaaactgcatcgctgcattcataaagtcatcgtgcatttctgagaatcgtttaatttctccgtaatgcgtactcgcaacggtaatacatcccgtaaggtacaactcttctaaaatagatattgcaagtgctgcaccttcatttggttctgtcccgctccctatttcatcaaataatagcaacgtattattatttgacatcctcataatctcagaaagatttttcatatgagacgaaaatgtacttagtgcattttcaatactttgattatcaccaatatctacgaatacattttcgaaaatagcaatttctgtacctttatctcctgcaatatgaagacctgacattgtagctaatgttaacaatccaatcgtttttaacacaattgtctttccgcccgcattcggccctgtaataattaaactacgatactcttgaccaattttaaaatttaagggtacaacttgccctgttaaaagcggatgcttacaattcactaaatgaatgtagccatgatcatttaacttcggttctattccatcaatcgatttactaaacttcgcttttgcaaataccatatcatactgactaattagctccatattaatctttatactataaatgttttctaacaccattcctgataaagtcgctaaaatttgatattcttcaaccgcttcttctgctttcaaacccgctagttccgcattcaatttcgtaaccgtatgcggttctataaatacagtagaaccttttgccgaggcttcaataatacttccagcaacttggtttttataggaagatttaattggaatcgtgtaacggtcatcctttttactaataaagaattcctgaatgaatttcttatttgcactactatttaaaaacttcgttaaacgttcttttattttcccatctacagaatcgatattatttcgaattcgttttaactctttacttgcagctgcatcaatactatttcctttaattgaaaagttaatttcctcttcaatacttttatattcagtcattgaatttgcataagaagctaatactggtgcaaaaaattctttatctaacataaactttttaatctttctacatccgcgtaaaaagtctgaaacactgactaattcttctggatctaaaatcatccctttttctaatttttgaattgtactagcaatattagaaatgccgaagaaaggaacatgcccttctgcatctaatatagctcgtgcttctgtcgtttcattcaaccgatttctcactacttttatactcgtactcggctctaatttgtttaataattccttacctaatccacttacacaataagatttcactatatcctttaattcgttatattgtagcttttcaaaagtcatcgtattcattttatttctcctcactatgattgatttttatcataaatgaagatacctactcattagattccaatgagtcatatataaaattccataattatacaataaaaatatatacaaaaaagctgcggggataccgcagcttttacatttacaaggcatttgtaataacatatgaggaaatatgccataaaaaatagatggcagtcccttattacacgctttataaagtattgtaggtatcttcataggttttgaaataaatgcatgacaaaattaggggtatgatgtacataaaaataccctggtcttatccgatttatttcattaaatttttcctatttaatacctaccgcactcacaaaaagcacctctcattaatttatattatagtcattgaaatctaatttattgaaatcatcatactatatgttacgtgagaagtaaaggtgtcatacttttataactatacagaatgtaaaaaggaataggaaaacttatatttcagtctacctcttctttttcatcaccaaattactgctgaacatatatggaaactgatcctccacttacttgaaactgcccccatccgtccttattaattgttacagtattcgtttgattacccgtaatatcgtaccatacttcccctgcgttattctttccaacatccatccactttgcccctcctggtccatcagagattaatgttgctaaaccagaattagcatgtacactatcaccttctcttgtccagccaatcacatctggatgatcaaaataatcacgctgcgtaccatatgcaaagttttttcgtgccgtcaaaatcggatcaattttgtcctttaacgctggaatttcatagttactatttccttttgtaccatagtaatcaccatagaaaacagaaggatacccctctgcacgcgttaaaataaatgcatatgccagcggcttgaaccaagggctcactacagattccaatgactgaccaggctgtgaatcatgattttcaactagagtaaccgcaagtgtaggatgattcgcaactaccgttccttttaaaatatttctcatatcataatttccatttcctgttgaagcataatgaaaattataatgaagtggtgcatcgaacacagattgattataattaaccttcgctaaataattatttaaagtctggatatcattttgccaatattcagctactgtaaacatttctttccctgtttgctgtctaacgtgatttacccaatcgcgcaaatattcatgatcaatatgtttaacagcatctaaacgaaaaccatctaaatttaattcattcgcataccacgttccccattttttcatttcattcgcaacatctggatgatcaaaatcaagatccgcatacatcaaataatcataattcccattctcgctagacacttcccagtcccatgctttacctatgcccctaaatttataaattcggtttaatttccttccttcatcccaatccgttccgtcaaaatgataccatttccatttgaaattagaataagaatctccacgccctggaaagttaaatcccgtccacgcactaatttcataatcacctgatacttcaatattccgattgctcgggtctacctcaactgctgtgacagtttctgtataatcagccccacctttatgattcataactacatcaccgtatacatcgatgtttttcttatgtaaagcgtcaattgcagatttcaattgtgctttcgtcccatacttcgtccgcactgttcccttttgattgaattcccccagatcatataaatcatatgctccatatcctacgtcattttgcgtagttcctttatatgcaggtggtatccaaacagatgtaattccttttttcgctaaattttcagcatcagtacgcaaacgattccaatgattcccatcattcggagcataccactcaaaatactgcattaacgttccattgttaactgtgtctgcatatgctttactcccgtcatatatactaggtaaaaacataacaactgacaatccgactattgttattcttttaaacatctgtacaccatccccttccaagaaagcgtttgcatagtttatcagaattattataatattcgtcccaccgttagtaaagtagcaatctctcactctctcatattatttttaatctaatttcaaatattcaacgtagttttaatttcacatcctattcaagattgtttacaatttacctataaaagcataacggagggatttcgatgacagactttcaaaaacaatttttcgcacgattacatatagaagaaaaagacacagtttcatttgaagatttatctaacattatgtacgcaatggcacaaactgtcccttttgaaaacttaaatattctcgaaaagaattttaaagaaatatcaaaagaaaatttgaaagagaaaattttagtaaataaccgtggcggtctttgttatgaactcaaccctactatgtattacttcctgaaagattctggattcgatgttcatctcgtttcaggaacagtttataacgctgcaaactccatatgggctgttgattctggccatatcgcaaccgttttaacacatcataatgaactttatttaattgaagtaggattcggatcatacttacctcttgcccctgtccctttctcaggtgaagtcattcactctattacaggagattatcgtattcgtaaagaaatgaccgaaaagggaaactacattttagagatgcggaaaaacaatgagttcttggatcaatcttctgctgatgattggacgttaggctatgcattttatatagaagaagtggatgaagaaaaagcaaatacagcacaaaaaattatcgttgaacatgaaggatcaccctttaataaagtacctcttattgtaaaactaactgaagatgggcatgcctctttaacgaaagatagccttacagtagcaaaaaatggtaaaaaaacgaaagaaaccgttacagacatgcaatatacaaaccttttacattcaaaattcgaaattacactataagtaagtaagccttgttatttcagcagggcttttcaattttcagcagggattttttgcaatttgttgtatttcatagttatatagaaatataactacatgtttagaaaggaaatgattatgacagaacttaaagatcgattacaagtagctgatatagaaaaatgggatttaacagacatttaccatacaattgaagattgggaaagtgattttcataaaattgaagtattaacgaaggaattacacgagtttaatggaaatattcacgatggcaatagtttattagcttatttaacgaagagtgaagaagtttctagcataatatctttaatgttcgcttatgcacgattacaatctgaccttgatacacgcgatactgacgcgcaatctcttgtcgataaagtatcacaattacacgtgaaagtaagtgcagcgaaatctttcttttcccccttcttacttagcatagacgaaaacacattacattcttacatagaagaaacagaaggcttacaatattataaagaagacttatttgaattataccgttataaaaaacacgtattaaataaggaccaagaagaaattttatcacaaatgggtgaagctctttcttctccacagcacacatttggtatgttaaataatgcagatatattatttggtgaagtgacgactgacgatggagaaaaagtgaacttaacacgcggaatgtatgcaaagttaatagaagatacgaatcgtgaaaagcgtaaagaagcttataaagcatattacaaaccatatgttcagttaaagaattccatcgcatctactttatccgctgctattaaaaataatgttactgtttcgaaattaagaaactatccatcagcgctagagaaatcattatttggcgatatggttccgaaagaagtatatgaaaacctaattgatacaacgaaaaaaaacattcaaacattacatacatacaatgaaattcgaaaagaaaaattaaacgtagatgaactaagacaatacgacttaggcgtcgatttagtagaaggtgcaaaacaagacatcccatatagtgaagcatttgacattatgattgcatcactagctcctttaggagaagaatatattgagacattaaaaagttttaaagataaaagatatatagacgtaagagaaacaccagggaaacgttctggtgcttataactttggtgtatacggcgttcatcctttcattcttttaaatcatcacgatgatttaaacagcctgttcactcttactcatgaatgcggtcacggtatgcatacgcactattcacatggataccaaccaagaatttctgcacattattctatctttgtcgcagaagtcgcttctacagtaaatgaagtgttattaattcactatttattaaaagaagcaaaagatacgaacgtgcgtaaccatttagttaaccattttattgagaaatttaaaggtactttctttacacaaattatgtttgcagaatttgaaaaaatcacacatgaaatggctgaacaaggtaaaccattacatgcacaagtcttcagtgaaatttatgaaaagctatttaaagaatataacggtgattcacttgtatttgatgaagaagtaaaatacggatgggctagaatccctcatttctatcgcccgttttacgtatacaaatatgcaactggattcgcatctgccattcaaatcgctgataaactattaagccgtgatccggatgctcagaaaaattatattgaattccttaaaggcggaagttcagactacccattaaacttattgaaaaaagctggcgtcgatttaacaacgccagaaccgattgaaagtgcattaaaacaattcactcaacttgttgaggagttttcaacattataaaaagcatgcagagtatatgctctgcatgctttttatttgaattactctattctatatgctgctgcgtcacacaatgaatcataccaccgtatgcatacaattcgttaacatatataccgacaattcttctccctggaaattgaccttcaatgatttgaagccctaatttatcatgttcatcaccgtatataggtaccaatacaacttcattaccaatgtaaaaatttaagtacgatcctttacaatctgcttcttttaccacttttcttgttactggtactggaatgagctgaaatggctttccatctatatttttcgcttgccgcaattcttgataatgcttttcgtacgcctccaaaaggtatggctctccttcatcgaaaggatcatattcatacagtatcgtattttcatttacaaaccgtgccgcgccatcaatatgataatccgtatcttcatcataattatcttctccgcgtataccagttatccatataaaatttgttactcctaaatatttcgttaactccatttcaatttctttctgacttagtgtgggatttctattttcatttataatagacgttttcgccgccattaaggtcccgtttccgtttatctcaattcccccaccctctagacagacactagattcaacttttggaatacgatacatttcacttattttattcggaatattagcgtctttttcgtacggatatttatttccccaaccattaaatatccagtgcgttaggcagcgattcccttccttatccgttacaaaaattggtccgttatctcgtatccaaatatcatcagtttcttgaattaagaaatcaattttatccatattcacgttagctacaattaacttcgattggacatgtattttctcttcttcatcacatacaacaatatggacattttctccatagtgaagctcctttgccatcgatatccaaatatcatctaacttagctctgtaaccttcacctctatgtgctttatcatgtggccattggagccatgtaccttcatgtttctcccattccgcaggcatataaaacaaactattttctatatttctcatacgtgttcaccccttatatgaatgtacgtacagtctatactttgacatcgtgttaaggtcaacaggaatatcttcatttacttgtagcaactttataaggtgattctttatttctcctttttattatgataaattgctttcatacatagaataaggattgacataatgttaatatcaatccttattctcattctattttcataactaaaaaacaaatttgtgtcacatactcttctgctaaacaatcacattcaggtccctttatataaacctcatatggcgaattaattatcacatacccatttctttcaatccattcttctaacgctatataagcgtaacctatatagtcgtaacttccataatgcatagtagtaacgatatgatgtggacttagttgtttcatttcatactcttgcgctacgtcatcatcattcccctgcataaccggaattcttaactcaatatcactgttactcggaatatattcttcatcataaaagactgcagatggagaaccgactatttgaaagttatttttttgtacctcttcatataagtcataaaaataatcatccatatcatctatatctatttttactctttgagtaattaacgttacttcgttactcattcccattaatatatcgtaacttctatggcgtgcaatatttagactactattcaccattaccatttcattcatttctgaaataacctgtaaattttgcttcacttcctgagacaactcgataatttgtgattgtatatgttgaacaaacgaatcttgatccgatgactgcaaaacaattttaatttttggaagaggaaatttatactcccttagcttttttattttcaatgctacttccagctgctcttgttcataatacctatacccattaaccggattcacatatgccggttttaatatctcctctttgtcataatgtcttaacatccgcgtactcattttacaaatccgagaaaactcagcgatggtatacatatcaatactccttgaatatattttcttttcattacttatttattaaaaccaatcaaaaatcttcttcattgaaaaattttcattctgatttttcaatcttctcattttcgaaggtaacaaatgacttggacaataccacgttaaacaattcatcgcgcctcccattgttgatatttctcctacatgaatttgaataacttgtttctccgtatactgttgaatatatcgtaaaacttcctcatctttagctagtccaaacttaggaacataaagagcatcacatgattctaacatatttatatacaacccttttgccgatgctatctcttgatcatattgtcctttctctgtatatgatgaaggaacaactataaattcagcttttggcatttgttctttaataatctcttgaacactatatctaaattcatgatcccctaaaaaatcactaataaacattgtatgttcatcaataaatttaaccattccgtctgcgtgtgctagtacatccccttcctcagcaggaataataataactcggctcacatctaaatcccattctaactgctcaataatttcctcttctgtccaatcatcgttatcatcaaatatgcgttctgttaatattacagtatcttttttattccaaataagattaccaccatctaatattaatggggattttacatattcaaagtcattctttttcaaccatttattaaattgttgatctaaatatcgcccttgatcatttggcaaataatttggtcgatatttaaatttaactagatgatttgtgacaaccggtgcaacatctcttagccaaatatcatcatactcaaaacagctcgtatgaaagtcttgttcttcaacagataaagatataagttgatccgcaattgatttcttttcatttaaacattcattaaagtaaatcaagtcttcataaaatggttgataatattcatttgattcgtctgttattgcagtaaaaataatgccattatgtttttgttccatattatttacctcgctttttaatagtagttacataactgattttacaaagtcaactattcctaattttatgtcttttgtcgttataactcatgcaacatgtacattttatgaatggattatagcatggagaaatattatatatttatataaaaaatataaggctgacgttaagccttaaattgactcttgacaagttttttaaataccatattttaaaacaacaataaatgattaaatgataactcgattcattaccatccaatttcagttcttgtataaactgaatgacttctttcataagaaacacacttagaacaacccctaagcaaattaaagctacatttaaaatgtactgtaaaacgatagggaaatacgaaaaaactattttaaaattctttaacacaaacatttttctcctttaccatataaaacgaaaagcgaatatacactataatttatttatcattacattaaaattttatcattataaataataaggaacgacaaaataggtaataagattccacctattttgtctatatagcagaacaacgaaattacaatcaattacttcaatgcaatgggttgttgttgtgtcacacaatgaatcataccgccgtttttatacaactctctcacatcaataccgactactttatgacctgggtataacttctgaatcgtatcgtttgcgattttatcattcggatcattataattaggcactaatacaactgtatttccgatataataattgatatatgaccctttataatcgagagtttttccattttctaaagcaaccttttctttactaagcggcaagtattcatacttatatttctgtcctgaagcattttttgcatctaacaatgtatccatatctttattagataaaccccattcggctaggtcatcttctttcatcgttacaatggtagatttattatggaatttagcaaatccatcaatatgaaagtccgtaatatctaaattaggtactccgtctaaccaaataaagtttgataccccaaggtcacttatatatttttcaatttccttttctgataaatcaggatttctatttttattcgtcaccgcacttcgagttaataaagcagtcccattgctgtctaattcaattgcgccgccttcaaggacaaattttccccaatcaactctttcaattcctgattgtttactaacatttttacgtatttgagcatcatttttatacggtgttttcttcccccaaccattaaatgctggatctaatattttgagatttttattgctgtcataaataaaaattggtccactgtcccttgcccatacatcatcagtaggcgcgataaagaaatcaatcttctccatatttaacccttcatctgttaaaaggttattgattctttctttttcttcctggtcatatgcaacaatgtggactttctcaccctcagttaaagcacttgccatcttaacccaaataggttcaacttccttcttatactcttcaccatatgtgtattcatgtggccattgcagccatgtaccttcatgtttatctttttcatctggcatcgtatatttcccagcatttttctgtacctctacttttttcccttctttccctttaacattttcattgttcccctcaaaagagcatccactaataatcgttgtagataatgtagctattaaacaaaactttattgcttttttcattttttcaacctcctgttcttgtctccaataatgtaaagcttcacatagtgtgaagctcaagcttttttatcaatgtaaaaattaccaattgttctttgcattacttaacatttaactacctatttagatttattcaaatgccaatcgcctttcttacctatttatcccgctatttatgggcagtaagacccccacctcaaaattcagcggaagcaaataatttaagtggggccctgttgcccgtaaaagcccgattgatgagggcttctactcagtggtggatgaacaaagcctctccactgattaaagtttcactttattcagtaagtaaaactttacaaaataaaaaaatcggtattgataattccatatcaataccgattttttataattattttccttctattaaatcattcgccattttcctaaattcttgattaaatgcatcattcataccattttggacgttagaaaataatatgacaaacgttcgtttatcccagttaaaattattaaaagtgttccagccagctaatacaccgtggttatgataataatctgggtaaatatagaaactaaatccatattttcttgcaggtgatgcagaaaacatatctgatacactttgtttagaaagtagtttaccatccataatagcttcatctaactttttcatatcttcaacagtcgtatacatttcaccacaaccatacagccagttcatttttaagcgaggtgtggctattaacttattatcttttttcgtatacccttctgctaagaaaatatcttctgggagtgttgcgcccattccagattcatgcatttcaacaggattcaaaatattttctttcacatattcagcaagtggtttatttgatattttttctacaatatatgcaagcaccatataattataatctgtatatttccatcctgtccctgctggaaattgtaacgtttgtgccccaatccacgttactaattttaaccgtgatgctgcgtcaacactaccttgtccctgttctggtaatccagacgtatgtgttaacaagtttcgtaacgtaatgtttttatctgctggaaacgatgggatatatttatttacattgtcttcaatgttcaacttccctttttcttttagttgcataatagatattgcaacaactgttttcgtaatagagccaatgcgatatttcgttcttggcgttgttagtacttgatctttcacattcgcataaccgtagccttttcgtaaaatgacatgacctttacttgctacaagaacactcccattaaatcctttatcttttaagtactgatctagttttccagctgcaatttcataacgctttttctcattcgcatcaatttcctgcttaacatctttttgcttactatttacattagaaaatgcctttgcatcatatttttttcctttatttgcatgtattagtgtaacaacacttccacaaaaaacagcaaaaataaagaaaatgattaaccatttctttaacatactaggagccctcttttatctagtttcacttaacgtacatccattctattttatatcttttaattatcaagtatattataatattatttaatattcactctgttaaaactagattcctttttctcactttcaattttgactactctctattgtatttctttcttgcaaaatttccaacatacaatcggatgcattacaatataatttcaaattcttttgtaacatttgttacatactaaaaagaatggagatgtatatgaaaaacaccgataaacgcaatcgtttagatgataagatgtttcattatcggataacaaaaaataacatgttattaattgaatattacggaaaacagattatggcattaaaaggaaatgatgctgaaaaatttttaaataaaataaatcatgcaaataacgataaagaaaaacagctaattatggctaaaattacaggtaatttcaaaagaggtaatgaacgaaattgaaaacgaatctcatttacattttgattatacaacaaataaaaaaagaaatgtcgctcattcaacatttctttagactttcttcataaaaaatttacattgctaacattccttcattttctatacttcctatataagctaaccgctgaaatagttagtaatacaactatacataaccacgcatacgtatatcccttcttatctacaatataaccaaataaagcaggcgcagcaataatggcaatttgatttaatgtaagtgcaaaactcactgtcatccctaccgattcttcacttgctgattccgcaacttcagttataaaaagactaaaccatccaattgaaaagaaccctaacaatgcacttacaccatacaatacattcgttattgtatgtatgctcattactaatattagaatgaagaaaatagaaatacaaacagttataaataagagggtacgccgatttcccttataaaacaaatcactagtagctgctaatataaccctaccaaccattccagaaaagaacataacggaaaatacttttccagctaaaattggcgtgattgattgttccaatactaaaaattttataaagtgtgcaactaacaccatttgcaatgaaatcatacaaatgccagttatataaattgcatacaattcttttttacacatcacttcttttaactgcatccaaaaagaaagtttactacgttcttgtttaactttctcttgaatatatggttccttataaaatataaaaaataaaaaccctccaattatacaaatacatgcaatgctatttaccgcataggccatattatattttattgtaagaaacgggatcaatactcccgctaatgtaccaccaatcggtataccggcttgtctaatccccatcgctaacccgcgattttcttttgagaaccacttcattatcaccttacttcctcctggctgcgaaacactataaaacgttcctactaataaaagtacaaagagtaacccattaaatccattgaccatattagtcagtaaaaacgaacttcctagtaaaaatgaacttatcgaaattaacaacttttcattgtattgatcaagtagccgcccgacaaaaagcatacaaaatagcggtcctatatttacaacacttactaacaatccaatctccgtattcgtaagtgcatattcttctttccaaaataaagcaaacgctccaacaccatacgttataagtgtcgctgttgtttgagcaaccgtcgcaaaaattaacataacccacttataagtactattcaccctttcttccattaacacaataatccctccatccccttccattgtatgaaagttctgatatcatataaaataaagatttatcatgtaatccatcaaaaaaaatgatgccttttctggagggatgatacttggatataaaagatttaactgtattttacgaagttgcgaaagaaaaaaacatatctcatgcagctaaaaatttaaactatgtacagtctggcgtaacaatgcgtatgaaacaactagaaaacgaattaggtgtgcctttattttatcgaaacggaaaaggtgtaactttaacttccaacggtgagattttattaacatacgccaaacaaattatccacttaatggatcaatctgttaaagcagttcaaagtaatgggatcgaaccaagaggcactttaaaaattggatgtacagaatctacaaccgctgtaagacttccatctatattaatggcctattatgagaaatacccaaaagtcgaattaattttagaatcaaatacgacggaacaattaattaggcttgtactagaacgaaaactggacggagcgtttatagctggctctactcagcatgccgaacttcatacaaatatatttcgtgaagaagaattagttctcattagcaaaaagcctttatcttcctttaaagacataggagacatgaatttacttgcatttagtcacgggtgctattatagaaatttattagaagattggcttcaagaagaaggaatttcacctaagcgagtatttgagtttggaacaattgaagcgatactcgcatgtgtaaaatcaggtatgggcatagcaattatgatgaagtctattttaaatggtcataaacatgacatattattcaatcctttaccaaatagcttccaaaaagttcctactacttttattactagaaaagatatatatcactctgctgcattacaaaaatttatggagatgactcacaatccgtgaaaagaaaatacgtggtatgaaacgaaaaacaaacactatgataaagcgaattgaggaacatacaaaaatgttcccttctactttctataacgatgaatactggaatatgcctttaccagtttctcaagcttttatcgattcttgtaaaacgcctagaaaagtaaaacgattatgtattcaaaccttattaaatcaagcaaatcatttaataaatataaaacctagggatacacatacatatcgagttgttgttttgatttctataaataatttatgggattcgcaaatcattatatttaaaaatgaggactactttcataatttctttaatagagatagtgaatttcaaaaatggattcttctttcaaatgaaattgatttttgggagacatgggaaatttcagtttgtcattccttcaaaacgcttcactttcaagaaattatttatgatgcagatgaatgctatgaaaaagagattacgtttatcggggagttaaattaaaaagggtatacctaaaacactggtataccctttttcacttatttttcctttaatacactatgtaatcgatccggataatttgtaaacattcctgtagcaccccatttgattaacagtctcatatcgggtttctcattaattgtataagggtgaattaacagtccatttttcctagccattttcatatatgactcatcaataattagttctccgttatcattacgtaagtttggtccaataccagctgcatactttttaatttcttgaaaatcatcatttgttacacttttcggttcatgtgtaataccagaccattcaacaatttcattgttttcatttggataataccaaagcaattgaactaacggaatattttcattcatactatgaatctttttcaaactatctttactaaatgattgaatcataacacggctagaagacatgttttggcctactaaattatatttttgtaacaacgccaacaaattctcttccattcctggatacacatctggtgattttgtttcaatataatacttcatacttcttccatacttttggaagatttcttcaagagttggaaccttttgcccaacatactcttgcttagccttttctggatacgctttattaaaccatgatccagcatctaaactctttatttcgcttaacgttttatctcgtacttcgcctgttccatttgtagtgcgatcaactgctgtatcatgcattgcaattaattggccatcctttgttaattgaatatctaactctaaataatccgctttcatttttttcactagatcataagaagcaaaagtatgctcaggtgcatgtccacttgctccgcgatgtgcaatatttaaaaacttattcgtattccattcatgctttccttctgctttcgcatgaacagctcccccagcaaagatgcttcctgtcataaagaaaataactaaaacgctaataatctttctcatccttcaaacccttcctacgttgcaaatttcaacaagctaatgagatttacacgaaatagaagacacactttcattatttttataaacctatattaaaattccaatcttacaaatgttttctatattattaatatagaaaactagtattatcctatttaatttctatagccctccttttcacatgtaactccctattttgtacggttcattcaataaaaaaagccataaattatttagaatacactcctgtatccctaaataaatttatggcttttctcaaatatctccggcctctattaacttgtcgaatttaatcatatcaaacctattgaaatttgtgaatatttttttcagtacagtgaagtacataaaacaatatttctgtagttacttaaaaatcacataataaatttctcattacctcttccaatactatatctggatttactaccgttttttccgaacgccatccgataaagccatctggtctaattaatacagcacctccattctctataccatataatttgctaaaaatatcttctggaacaataaagtctccacttaagccaacacgatacccttttagatgtattcctaatttagctgaaacagcatgtgctgcctcagcccaagaactattttctactcctgtaagtaatacaaaactgttaccgaataagtctaatgtagaaactttcttcccctcatacgttccccataaatgtggcgctcgcgttccaggtcttccgttcaactctatgctatccattctatgcggagtgactgaatcatctataatcgcctctgaacaatactgatatccaactgtaacagctaaaccatccatattattcaaactgccttcctctctattcgcagcacgaaacagtaaactacttgcataagctgtcgttaattttgcaacagagtgtctctcctcatgatatgtttctaacaattttggttttgccttcccttttataacagccgctaatttccaagctagattgtgcgcatcttgtattcctgtatttgaaccaaatcctcctgttggcggcataatatgtgcagaatcgccaactaaaaaggttcgatttccttgaaatttcaccgctgtactttcggctgcttcccacggtaaaacacttaatatttttgattcaacatttgtacttccaattgctatttgaataatttgtttacaacgttctatagtgaagtcctctagcccctctccttttaatggatcgtaggctacatgataaatccatttttttacgttatcaaccgggataagtgcaccaagaacctccggatgaagtaccatcgaaaaaccgaatgcatctccttgtataaactcacttaaatcagcttcaaaataaatattcatataatagccaccaatggttccacgaccctcagttttaatccctaactgctcacgtattttacttttcgctccatccgctgcaattacatagtcacaatgtatgacactttctttttctgtttcacgatttcgaatcgttgcttttaccccgttttcattttgttcaaatgaaactaattcatgataaaaagatagttgctcgcctaatattttcgcttcttgtaacatcatctcttctaaaataatttgataacacgcagtttgttttgatggactaatcttttctattttttgaagtaactcttcatcgtttccgtattgcgtcgctctcatttgttccaattcttctttattcgcctcagctattgtatgaaccgctattcttcctctgcagttctctaatgctttacctgccaatttaattctttgttccaagcctaattctcgaaataactccattgtacgtaaagtaagaccgcctgctttcggatgaatggcagtagacggatgcctttcaataagtaagtactcaatattatgttttgcaagaaataacgcagacgctaacccagataatccccctccaacaattaaaactggtacatcattcgatttcatatatttaccctccacatcattgttctgagctcagtgacataaatataatcaaaaaaaacattaaaatatagacttatatttcattttgaattatcatatagatagattacgccccaaaattccttttaccttttcatacatctataatccacctgaattgtgtctgtatgaaagtgtaaaacaaaagaatgtaatttacgttgaaccatgttctatcgtaaaaatcaaaaataatacaaacattataagcggccgtaaccttatggattatacaaggttacgaccgcttattttattgttacatcattttttgtttttaaaacttcatctattgtgttatgtaatccttccaatcccttttctatctccctataattttcaacaataaaaaattcattcgtctcgattttctttctcaatattgcacctcatgcaacaatcatgtagcattaccgtatcgaagtaatggttcatcatcttaaacctttcgactaattttttggaggtaaagtgattgaaatgaataaacaagaacaattaaatgttataaaaaaagattttattgattctcaaaaagtattattggcaattggcgatgaaacacgtcaagctattttgttagttctcatggaaacggaatgtcaaaccggattacgtgtaggagaaattacgaaacaaacacacctttctcggccagcggtatcacatcacctaaggattttacgagaagccggtattattttaatgcgaaaagaaggtacaaaaaacttttattatattgatatacgtacaaaattaggtgtattaaaaaatcttgtgttagatattgagaaactattgcacaacttttattaaaatttggaggtataagaaatgaaagcaatgataattgataagtacggaaaagttccaatgcgcatggcagaggtacctactcctgaaataaatcaacatgaagtgctcgcagaaattcatgcagctagtattaacccaattgactttaaaatacgtgatggaaaagtaaagatgttactgaaatatgaaatgcctctaatccttggtaatgacttttccggtgtcatcgtgaaggttggatcgcaagtaactcgttttaaagtcggcgatgcaatatatgcacgtccaagaaaaaataagatcggtactttcgcggaatatatagccattcatgaggatgatatagctttaaaaccaaaaaatttaagttttgaggaagcggcgtcgattccactcgttggcttaacatcctatcaagcactacatgatattatgcatttacaaaaaggacaaaaaatattaattcacgctgggtctggtggtgttggtactttcgcaattcagttagcaaaaataatgggcgctaccgttacaacaactgctagtgaagctggttctgatttagtaaagtctcttggcgcagatcaaattattaattacaaaacagaaaaatttgaagaaatactcaaaaattatgatgcagtatttgatacaatcggcggaacaacacttgaaaaatcattcaatattataaaaagcggaggaaacattgtttccgtttcaggtatgccgaatgctcgcttcggtaaagaatttggttcaggcttctttaaaactctcttattttcattagccagcaaaaaacttactgcacttgaaaaaaagcataatgctcaatattcatttttatttatgaagccaagcggggatcaattacgtactattgcaaactatattgaagccggaaaaatcaaaccggtaatcgatcgagttttcccttttgaagatgctcaaaaagcaatggaatattcagagtctggaagagcaaaaggaaaaataattgcaaaaattaaataataataaaaacctccattttcttaaaatggaggttttaaatttgctgttaaatagacatagtgcaatgaagtccttacaatagattgcaaggggaaatattatattatacttttagttaactttacaaagaatacatacgtacaaatacataacttaaaatacaaaaaggaggagatacaatgactaaaaataatgaaacaggttggaatttagataatagttatacgactttaccacaatcattttatacagaaatcccccctactcccgtaagttcaccggagttagttaaactaaaccattcattagcgatatctcttggcttgacccctgaagaactgaaaaaggaagctgaaattgctattttcgctggtaatgcactcccagaaggagctcatccattagctcaagcatatgctggccatcaattcggacattttaatatgttaggcgacggtcgtgctcttttaattggcgaacaaattactccttcaggtaagcgtttcgatattcaactgaaaggttctggccctactccctattcacgccgaggagatggtcgtgctgcactcggtccgatgctacgtgaatatattattagcgaagcaatgtatgcactcgatattccaactacccgcagtttagcagttgtcacaaccggtgaaccaacatatcgtgaaacaaagttacctggagcaattttaactagagtagctagtagccatatacgcgtcggtacatttcaatatgctgcagctcgtggttcaatagaggacctgaaatcactagctgactatacgataaaaaggcattacccagaaattgaatcccatgaaaaccgatatactgcattactacaagcaatcattaaaagacaagctagtcttatcgcaaaatggcaacttgttggatttattcacggtgtaatgaacactgacaatataacgatcagtggcgaaacaattgattacggtccttgtgcatttatggacaattacgaccaaggaaccgtatttagctctattgacacacaaggtcgttatgcatatggaaatcaaccatatatggccgcatgggatctcgcacgactagcagaatctttaataccgattctgcacgaagatgatgaagaagcactaaaaatcgctcaagacgaaatttcgaaatttagcgtacagtatgaaaacaattggttccttggaatgaaaaagaaattaggactatttagcaacgaagaacaagatcaatcacttattgagcaacttttaaaaatgatggagaaatataaagcagattacactaatacattccgttcattaactcttgatacgttagaaaatatccctctattcgatagtcctgaatttaaagaatggtacaaactgtggcaatctcgattagaaaaacaagaagaatcgaaagaaaacgcctacgagatgatgaaaaataataacccatcaatcatcccgaggaaccaccgtgtagaagaagcactagaagcagctgttacaaatgacgactatagcgtaatggagaaacttcttgaagctttatcaaatccttatgcgtattctacagatcaagaagaatactgcattccgcctgcaccgacgaatcgcccttatcgtactttttgtgggacttgattaaaaatttgtttttattttaacccaaaatttattaagttaactattaatcacaaacttaaaagttgctttcaatattgaaagcaacacatttagtatccacccttaaacaagtcacaaattataatttgtgacttgtttaattacccacgttcaatagaaggtttgttttgcaggcatcgttgtatcttcagagacagcatatggattttcattaggttttataattataaacgttccaccatatccactgtgagctaatttattgcaaagaccttctaccataaaaccccataactccagctgctattcccattatagataatccaagttttttctttattttaatgcttctttttcaaatattctcttttttatttcataactcataaaaaaatacttttctgctttttctatattacctactttatgaaactctaatgccagactttcagtatattcgtgaatatactccgataaattttttctttcaaagtaagaaaaaccttcaagaataattttttctattttttctacctctaaatgctgacaaaatccctttagaattaaaaagtgatatctatattcatcattttttaattcctcacaaaccttcaatccactttcaattaattccttcgctttttctatttcacctaatttataatattctcttgcctctaaaaagattgccttataatgagtaggcatttttttagaaacctcagataagtgtctaattgctaaaactgaaagattttgactcgcatacaataaacctaaattatgtctgattcttaatactaacatttctgcatcatttttttgtaaaatgtttattgctgacgcaatatattcctcacctttatcatgctgctttaattccgaaaaagataatcctaatatattttcgcacagcgctatgttcacttcataccctgcttgtttaacaaagatatctcttgcctttgaagcgtattcaatagctgaatatgcgtaatgcaagtggtattttaatatagcaactctataattaaactctgcatattcaatttcatctgaaatatgctctaataacccttcagctttttcaaaatagttgctagcttcactataattagtaagaattgtataatgaatggctttgaataaataataataataattagaatattcatcatttggtttaggcaatgcatctattttatcaaaagcttttttcaaattacctaaaccatctattagcactttatatcgaaattctaacagataatagtgaaatgaaacctttatatctgattcgataatataaagctttttatcgatctcttcttttaatttttttgcctcacttatacgttgagctctaatatctcgataccaatcattcagcatcttattaattaattcattgccagtgatttgtatattcatcaaatccactctccttcttttaattatcataaaaataacataattcgattatttatatctatctatctatatatatatttctcaacaattgaacgaaattcattcactgaattttgttcaatattttaatagacccgctgtaaatatgaatactttttcttataacctctgaatatgagtatccttaaaatccgtctcatatttcaatccatatccaaacattcgatccattccaatatgtgctgtccatattaagccaatcattataacggtatctatcttaaaatagacacctattagaacaattaatatggatatgatatatgtgtgacatacattatatattttcgcaccaacgtgattattaatcccatatgctaacattgatagatccggcgctaaaaggaatacaaaaaatataatccaactaaactcatatatcgaatacatataaatcgtggctaaaaatacaaccattccttcaaaatgtacaatacgtttttgcattatttatcattcctatttttctatatttattgatacattttcatcgctgaaagtattctttgtattttttgaccagatggttgctaatattggccctgcaatgttatgccatactgccgctaatacacttgggagtgcagcaaccggtccaaaatgtgctgtcgccagcgcaacacctaaacctgaattttgcattcctacttctattgaaatagcccttcttgtcccttcgtctagtccaagtacgaacgcagttatatatccgagcaaaaaaccgaaagcattatggagcatcaccgcaataaagataagaagtcctgaagaagtaatgctacttacatttgctgaaacaactgcagaaacaattatgataattgctacaactgatattaaaggaataacagtcattcctttattaacgatatgagggaaaaactttttcactactagtcctaaaataataggcacaataatgacttgtacgatagaaagaaacatggacatagcatttactggcatccattgccctgcaagtaatagtagaatgagcggtgtagcaattggtgctagtaacgttgatactgaagtcattgcaatagacaacgctaagttcccttttgctaaataaaccataacatttgatgcagtgccacccggtactgaaccgagcaacactaacccagctgctaattccgctggcagattcataacgtaggctagtacgtatgcgacaagtggcataataataaactgagcacatacaccgataataactggtaatggttttgtagctatgattttgaaatcaacagccttcaatgttaatcccatcccaaacatgacaaccccaagtaaaatcgttatgtaactagttaatccgagaaatggcgcgggaatgaaatatgcaatagctgcaatacaaataacccaaaatgcaaaatactttccagctatattacttatcgcttctagtactttcatccactcagcccctattttttaattgaaacacctttttcggattcaaaatattttgcggatcaagaactttctttattttctccattacaaataatgccgccccatgttcttcttcttgatactttcgtttcccgattccaacgccatgttctcctgtacacgttcctcctcgtttaagagcatactgaacgatactttcatttatttcgtctgccttcttcacttcctccttatcatttgtgtcaatcattaagagtacatggaaattcccatccccaacatgaccgagaataccgccaataagccctactttatgtaatacctctttcgcatgttgaatcgctccagctaattccgaaattggtacacatacgtctgtactcattagctttttaccaggataactatgcacgtaagagtacgctaagttatgtcttgcatcccacagcttatttctcgctgctgtttccgtctcaaacgcaatttctatacatttatgatcaagaacgatttctttcgtaaattcaatatcttgctttaaccctgcttcattgccgtgaaactctaaaaacagtgtcggttcttctctgtaacttgtttcattgtaataatttacttgtttcatagataattcatcaacgagttcaattctcgcgattggaatacctgcttgtaatatgttaattacagcttctactgcatcatttatagttggaaacgatgccctcgcagccataacatgttctggtataccgtatacttttaaagttaactccgtgaaacatccaagtgttccttctgagcctacgaaaataccatttaaatgataacctgatgatgacttcgccgctaaattcccggtatgtattactcctccatcagcaagaacgacttctaaatctcgaacttgatcacgcattaccccatactttaccgctgtcgttccgctcgcatttgtagcagccattcctcctaacgttgcatcagctcctgggtctacactaaaaaataatccatactttttcaattctttattaagctgagagcgcgtcacccctggctgtactctcacaagaaaatccttttctcttatttcaagtattttgttcataagagaaaagtccattgtaattcctttttcgtaaggaattacatgtccctctaaactggaccctactccaaatggaacgacagctgttccgtgctgaatcgctattttcattatcgcgctaacttcttcggtcgtttttggaaaaacaactacatcaggtaaactactactatggtaagattcatctttactatgtaactctcgtactgtcatatttattactactcgatcttcaggaagtatgccttttaattcatttactacatgttcaattgttatttccataatcaactctcctttttaattttaaaacaagtataccatctttatacaaaataattagaaaaataagattattaaacctgaacatacaaaaaagaacctgcagcacacgctacaagttctttttcactacattttaaacgatttctttattaacaacataaaccaaattaaagtaactgccatcaacgaatgagaaaatcctacaatataagttaaccctttaaagtcagctccatttaactgaagaagccctctcgctgctagcgaacctaacattaatgttaatgcaatattatgtaaaacaaaccacttattaaacccttgcacttcatgaaacgcgaatacttttgctaatcctaaagcaattaaaaagaagaaaaagccaagtacaagtgtatgcgtatgcaaaagatttaacaaagtagaccctaaaatccctttatacttaccatactccctagcgaaaatccctgataataaaccgataatcaaatacgtaaacgatgcattatataatttcttcattatgtacctccttgagtagaatgtatagtgtgtcatatttagtaataatgatagttatatagtaaaaactcctaatcacctaggagtcattgtataagcatctcactctttacaatcaatcctaattataagatatctctctatacaaaacaaacgaactttatgtgaacaaacacccccattaaaatatgttgcacttttgttttacacaatccatactaattgttataactttttaaaggtggtgtaattattgatagttcttgaaactgaacgtcttaatcttcgctggtttgatataaaagacgctccttttattcttgagttagtaaacgatcctgcatggattcagtttatcggtgacaaaggagttagtaacttagaagatgcaaaaaattatattgtaaacggtcccatcgatatgtataacaaacttggattcggcctttacttagtagaacgaaaaaaagatctcactccacttggtatgtgtggccttattaaaagagattcattagaagacgttgatatcgggtttgcctttttagagacattccgttcaaaaggatatggctacgagtcagcttctgcgataatcgaatacggtgtacaaaagctcggcatgaaacgaattgtagcaattacttctgtagataacatcgcctcaggaaagcttttagaaaaagtaggattacgatttgagaaaatcatttcagattcaggagaagatttaaaattatttgggtataacgcatagtaaagaaggtcgccgtgaatggcgaccttctttactattttactaatcttgtcataatacttttagttccattatagttttgcagtaattcttatgattatcactattcctttcatatcacatttttggaaattcatagaagtgaaactttcacacccgagtaaattatattaatatattaaacaaaggaaatgagaataaatggaacaaccgctatttttattagttcttcaattcattgcattcatattaatcatttgtatcgtatatggaatgttatacaataccgtattaaatttaaatatgcctaaatggactgcacatatggtagctacggtattttcccttggtattgcctatcaagcttttataaattttatttgaaaaacttttgtagcaattacttctattgttgatgcagtaaagcttttagaaaaagcaggattgcaatttgagagggttatttcaagatcagaaaacgtaaccattttttataaagtctttccagcgcaaaatagtgaagaagttagttccgctaaaaatgtgtttgcataacaaggaatgaatttaattgatcctgcaaaaattttatttgaattctggttctattgtttggaatcgttctagggtaccatttgtgtggactttaaaaattttcatttgcgcaccaaaatgttgagttaagtaaaatgtatcactagttattaaatttccaatcttccaatcaggttgatatgtactttccatggaactttctaaatccccaatcattattaaattgatatataatgaagatgaattactcaacattttcgttaaagatagtctatcaacctctaactacctaatgaactccagtaaacacatcttcagtcattttaagaggtacaaaaggcaccctttcgggtgatttttgtataaaaattctatttttttatattcgataccaaccacgaacctttttaaaataatagtatcattatgtctcctttttagagattatttttaattaccttgaattttttgcaccagaaccggaaaatccctgactacacgaaatatcaactatcaagtgctaatattcaataacgcgtactgaaaatgattaaacatttttataaaccagtggaacatttaagaaatcaatttttctcttatcgaaatttaattagcttacagtaatacagtggtcatatatttttaagaataacggaagaatatatagaaattgctacagaaatgtgaagtttaattaatttaggaggaacaaacttgtttaatcagcttgtaaaagttataccgaatttatttacgattggaaatttattgtgcggtgttttctcaatcaccttgaatatgagtgaatatttaggagcagcctccattctcattttcttttcagctgttttagattttcttgatggaagaattacaagaaaattaaaagtgaacagtgagtttggcgtagaattggattccttagctgatattgttagtttcggcgtcgctcctgcgcttttatttcatacgatagcaacaccttctattttaacttctttggcatttatcctattcccaacaatgggtgctttaagattagctaaatttagtattaaaccaactattggatattttaagggattacctattccagctgcaggattatcattggctggtatggcattgttttcatatagtaatgcatggattactttaatcctcgccctcttaatggtaagtcccattaggtttaaaaaattttaatgaaggtcacgcccaacgccattaaggagcattttaaatggatttaacgcgtcaataagtataaaaaagcgggacaataatattaaattaggtgcccttcgaaaaattaaaaccttgtatttatggctattgggttaatccatcgatatgttattctgaaacgtcaatccacttttaacaggagctccctttatcaagagagctcctgttcttatttcttcttcttttctgtcggttggctttgtttagcaaaattagatgaatcatcaaaattcggttgctttttaccagcattattacttctaccttttcccatatgtaatgcacctcccctcccccttactattcccaataaaaaaattctcttgcatccaagagaattttaaattgggttcttattgatactacctaagtacttccaacactgccatttcataaaagatggatccaatgttaaattatttaatgctaaaacaaatattacattttcatatttaactggataatcaattaataatcctaatgtatttcctgaagctgcaacaattatgattcccttttctaacacgtcatctataacttcttttaattattcttacctagcatataatatttttctacacattgagattgcttgttgtataaggaagcttttcttttttccatgcaagaaatcctccctttaaattcactacttcctttataccagctctttgtaaaatactagctgctatagcggaacgtaatccggttcgacattgcaaaactattggaaaatctttcggtatataatctagttgttcaaatagattacctaaagtgatatgtattgcatcatgaaggtgtccttcctcccactcttttttactacgcacatcgataaccttaacgcttccaccttttatatgcggatataattcaatcgatgttttttctttgtaactttcaaatctatcaagtctttgtattacttttaagggtgcaaaagcaataatattatctaacccaatagattcaaattctctaataactgcctctactttaaccttttcctcatctagaattattaaagtttcttttttataatctaataaccatccacaccaagttgtgaaagaattgttataaggtatgttaattgacttctcgatatgacctgcagcaaaactctctacatcccttatatcaactatttgatgaacgctcttcaaaatttcttgaagttcttctactgtattaatagcagtactttttctcttcttacgaattggcggaccatacttatttaaattcttcattaatgaaaaatactttggaggctctggctgtcccgtcaataaagtcgatataaaatcactttcttcattacactgaaatgcccaattgaacatcttttcataacctaatgtagaagttggaattgctcctaatgcttttccacatgcgcttcccgcaccatgtgatggccatatttgcaaataatcaggaagtatttttattttttgtatagaattaaataattgtttcgctcctatttttgcagtatccttaataccgactgcagtttctaataaatccggccttcctatatctcctacaaatataaaatcacctgtgaatatccctatcggcttatcattcgtataattattttgacttgtatcagttattaaaaaagaaatactttcaggcgtatgccctggggtgtgaattacattaaattttatatgacctactttaaactccgtgccctctctaaccaatttgtatcgaccttcgttaagatattgatatttccaatcacaatccccttcatcagatacatataaatttgcatggtaaagagtagaaagttctctagacccagaaagaaaatcagcatgaatatgtgtctcagccgcagcaattacttccatcccctctttcttagcaaattctatatattgttctatatagcgactaggatcaataacgattgctacgccttctttctgacaaccgactaaataggaagcatgtgctaatttttcatcataaaaatattttaaaagcatatctattccctccaattagttatttcaaattgattttcaatttttgtaaccattttttatcttctcctatagaatccctttcaacattaaattccaatacatatatggcaacatatatcttttaagtaaaaacatactatacctttctttcgcttgattaaatggaaacgtttcttgtggctcatgttcatagttaaattcagcgagtataagacttttatatcctgtaacaatcggacatgatgtatatccatcatatttagcctgtaaatctcttccgctaagtacgtccataatattttgttttaagacgggtatttgttttcgaattgctgctccagttttagaggtaggtaaattggtacaatctccaagtccaaaaatatttttatattgcacatgctgcaaagtataagggcttatatctacccatccctgatgatcacttatctcactctctttaataaaattaggtggccccattggtggaacaacatgtatcatactatatggtacggtttctctttttagtgtttgcgtatcttcaaaaattgcctctctcttttcggcgataatttccactaaatttttattataattcgttataatttgctttctttctagtacttgttctaaagtatttgcatatcgtggaacctgaaatatgttattgtttgcagaataaaacattacttcacttctgtttcttacaccactattacaaaaatactcctctgctaagtacataattttttgtggagcaccaccgcatttaataggagtattagggtgggtaaaaagcgcatttcctcctttgaatttttcgatttctctccaagtagaatcaacatatgtataagaataattgctacataccccattagtgccaatagactcttttaaacctttaatactgtcccaatttatttgtataccagctgctacaataagaatttcatattcaagtaacagtccgtcatctaaaagtatcttattttcagatggaaataacttaacaacacttttagggatccacgttgccccttttggaataagcgattcctgattacgcatcgtactttcctttgaaacaattcctccccccactaaactccatagtggctgaaggtaatgtttttttgatggatcaataattgctatactttctttaaataggggtacatttcgtaataaatgtgcagtagaagatagtcctgctgtcccagcaccaattacaataattttataactatctctggtcttcattatcctcttcctatctaaaattgatttttaaattaactaattagtagccattttttcatcgtagtaacattattataagttaaaaacaccatagttttatctgatttaaatgaaaattttgttaattttaccatcaacattactatatgcgtaaatcccttatgttacttccatattttagttttaatattaaaactttatatttttatataaaataaaaataatatattaaaatacttttcatgaatccggataagtaatgttaaaaaacaacatctaacatcttagatgttacaataaacaaattcacatacttcacaaatatgaaaagtattaaatatcacttaagtttcgttaccttttcttctgtatatattgataaaaaattgtgaaattttatcgcattatgcaagacatttaatatcaaatatattactttcactatgaactaaatggtttataggaaatttatagataaataaagtgctaaattgactcttatgcagtaattatcgtttaatttatcgaaaaattgaaaaaatatgtgtagatagatatcatttaaaatacatatataattaattttaattttccgacacgttttttcacatagttcttaaactagttttttgcgtgcattatgaaaaaaattgtaccgtgtcaatcttaaaaaattatatatcataactttaagagaggaaggaaaactatgaagatgaaacgaaaaatcattatgacaacagcacttgcagctacgttagctacaggtgcactacctactacctcggtgtttgctgcagaaaaggaggctcctattcaaccaaaagaggcacaattaagtattcaaccttttgcacaaaacaatttggaaacagccgttcaagctgccttaaatggtccagaagtcaaaaaaatcaaagtatttgaacatgaatttaatgtaaaagaaatagaagtagtaaatctaggtgcaggaaaaaaatatgttaaggggcaaatctctcaccatttaagttttcgtccagatgatcaattttattatgagtttacagtacaagatggaaaggtactagataaacctgtatttaatattgatagaggtggttggacaccatttgctgctccacttttatcaattcttgctgcgtataatggaattccagttaatccaaatgatttaaatgcacttggtcagcagattggtaaagttatagatggaagctgggaacatgcagctcaatcaattgcaactgtagttagtctaagttttaatgagtagaatttttcaatttttattagcagtgtagagatccgctttttgtaatcagccttgttataagagattctaaaacagctattaataaatttttaccactcaatcacattatcttgatttgtttaccaccttatcattcattatatgtcacaaaatagaagtcttttttaggacttctgttttgtttgtattcaatacgataaacagttgttttttggaggctatacttcgagttttcaagaatccgtttgactattagggacaatttataataaaaaattattaaagtctcaaataacttactcccccctattgttaattatttttaaatacaaaaatttattatcttaagaatgaaaaacaataaatatagtaaaaaatcatctaacaattgtttaaaggtcaggagagaaaaaatgaacaaaataaaaatgagaaatttctttaaaattagcatccttacttgtattacactagcaagtttaaatagaccatctactattttagctgatagtcatccaggttactcctatgaatccaatatagggtatcaaaatccatcgtggatgtcgaaaatagaagattcaacaaaaataagtgaaatatctattccagggactcacggtacgatggctttacatggagcgagttttcttgatgaaaatttgacaagaaatcaaactatgagtttatcccaacaattaaattccggaattcgatatgtagatatgcgtgttaaacgtgtaaaagattcttttgcaatgtatcatggcgttgtaaatcaaaaagctgtgtttgaagatgtgttaaaagagaccattcaatttttaaaagatcatccaacagaaacaatattaatgcgcttaaaagaagaaactactcctgaaagtggatctctatcatttgaggagatatttttaaaatataaaaacgttaatgcttcatatttttgggatcctaattccgtaccaacttcagatagaaataaccctactttaggagatacccgcgggaaaattgtaatcttacaaaactttacatccgctcaattgtacgggattgattacgaaggtttgaatatacaagataaatttgaaattggaagcggaccagacgaaatatatacaaaatggattgcgataaaaaaccatctacaaaatacaaatactaattttaataatgaaaaaatttatctcaaccattttagtggtacgggaggcgcagccgcatttttaaataatgtatatccttggtttgttgcaagcggaaaagagagcagaaatactgacagtagtcctaaattgattcaaacgaattccactaatgcgtggagtgattttcctcgcgatagaaacggacaagtatactatggggggatgaatacacttgggaccgaactcttacaacaaggcgcaattaaacattctggtatcatcgcagctgattttcccggtccaggtttaattgatagtatcattaaattaaatggtatacattcaaatgaaaaagaaatattaatttcacaaatatcatctgaatctagtcctttatcagggcaacaaaatcgatccagccaaaactttaaaattgatagtttacctgtaggtaccaaagaattaaaatgggttattgagccttcagaaaaagattatccttctactatttctttcaatgtaatgattgatgtttccctaggaatagattctactcgttggaaaaatattttacatgaatctaggactgaagcttacacaaatactaaatattatattgcaagtccaattggtgccactagcaaattcacagtgaaaatatatgctattacaaattagaaaataaagaatccaaatggaattcctttttgatggaataccattcggattcttttttgattttaattcgttaacattaggatgatgattaaatttattaatataccatttaaaccattagataattcatgcttggaacgacccttactttttaaagagcaatccaaaattgttaactacctttttcagcttatcacttattcaaaactggcttccaaagcgataaagcaaaaatccaatttgagtcgccattcccttgatgattttgaaccgcttcgtacactttcccctcatgtactactctatcacctttagtatatgcttttcttgcatcccatttttcatatgcgggatcctctaactttgttgttacattcaaaacatcacttctactagattcatttccagctaaatcaaccgccgtcactacatatttatacgatgtattagccttcaaatctttatccataaaagatgtattagccgccgtcccaattttattcataaccccagcgctttctctatatacaatataatggtcaacacctacattatcttctgacggactccacattaaattaacagttgtcgctgttgtacccatactatgtaatccttttggctgagttggagcctctatatctgggattgtatgtgttgtcttaaccttcagtttttcactttcttttgatatgtttccagcagagtctaatgcctttattgtataagtatattccgtatctgcttttaattttttatcaataaaagttgtacctgataccgtatcaattacttctccattacgtaacacttgatattcttttacacctatattatcagtggaggccttccatgttatttcaacactattggcagaaactttagaggcatttaattcagttggttgacttggagctactgtatcaggagtttcattatttactaaatttacatcaactacattataaaaagcgtttgacgtatctgctacatcccatacagctaaaataacatgataaccattacgatcagttggtacattaattgtatgtgttaaattatttgatgcggccgaaccgtcatgtttcacagttccgattggttctaattcagcacgtgttaatggtttgttaggatcccatccttttttggtaatgtaataatgccatttacttgtagaatgtggcgctgtatatttccatgtaaatgtatttactccacctttaattgtgtttttgaaccaacgatttgatgtttgttggtcaagaatacctccaaacaatcctcctgccgaagcaatttccccatcaatcggtccactatctggaaatcctttaggtgcttctagactttgaggttcatacattacatttccacaatttaaatttaatgccccataattctgactacataaagcagcacgactactcggcttttcaacaaacccatgtgcatacgcactttgaggagtcattgtgattgccgtcatgcctgcagccaaaacacaagcaccaatcccctttttacttgttcttaatctttccaatttagatgttaatttcaatttcatttttgtccccccaatatattgctttcgctaatataatagcaatatagggataaacgaacaaatcgtcaattaatatattaatatctctcataaattggtacatttattattatttttaatctcctataaaaataaagtaaatacaattaaggaattttgtaacattatgtattaaaagaagaataaaaaccccatttaatttcacaaaaaattcaaatattaaaacaaaaaaatcctcatgtaggaaaaataaattttttatattacaaaaagaaaaaaagtctggaaaaaaccgattatatccgtttcttccagacttccgctacttttataccactcacaaatcctttaaccttaaacatatacacttgaggttaaaacacatataatacccctactaattcaaactaacgcttaattacttataaaataacttaaggtatctagcttaactgtattttctttattaatagctattttctattctgtatttccttactttaaacagattatcaagaaattgttaacgtttaagaaaagagaaagtatttaaaaatctagttttaactatcaaattttaataatttattgtgttatttttatctaataaggcacagaaacaaaagatgaacttcagtgtgctttagaaaaggttcttagggtgaaacgtttaaagggtattttagtactgggtttttattaaatgttcctgtacctaatatttaaattaacggatgtcaaaatattttacaatacgagtattaaacgttacatatttttatataaaatgatacatttcatcaacacgcctcttctaatctttatgataaatatagaaaattcggctctttaggattttattttagaattctcataaaagtatataatagattagacacataattgtcacaaattaatagtttatctactttatgattacctatgaaaattttattaccacttcaatatttatcgataaactaaagcactctatacttacaatttcttaaaacccttttaaataatctttcaaaagagtcgctagttttatattttttatttttttattgtacatttgtacatttgatgttaggattatgcctattaaaattgaatcctaacgattcttctttataatttccatgttttaattgttaaataaaaatatagattctgatatatatttaaaatcagaacgaaaatgtcgttattttacaatgatttcgtggaatacctttagaatggaaagatatatgcaacaacgtgttaagggcttacagggggaacaaaaatgagagacttttttgatgataagtataaaaatattgaattaaaaaggaggttaataaatttaataagtgaaattagcgaattcaaaggaaaattagctgcttatcaggaacaaaacccagacatatttaatagcttagaaaaaactataccactacattacataaaaaatttcacaactatttatgaggatataaaagttcctaataaaagattaaaagaacttattttagatgatatcgtacctcaaaatatttcggaagatgctattttttgctattatcaaacactttcttttgtacataaaaactcctgtactttattaatcaatccagcaactatacaggaattacattttcaactaatacattacattacctctgacagtgccaaatggcgtgaaaaaccttttatcattccaggaattccagaacatggaatgcacttgaatagttaccgcattcttccgcatgaacttattccacagtttatggagcaattatgtgatcaatacaactcattaaatactagtaaggggctacattcacttttattaatagctcgttttatattaaatttttattgcatagtccctttcaatcaaggtaataacaggctggcatttatgttaatgcaattgctgttaattaagagtggacatacatttgtaaaatatgtatgtttggataaatatattaagaaacatgaatctgattattacaattcgctttataaatcttcggtgaattggtactgcgaggaacataataatagcttttggttaaaaacgtttttaaccattatattagaggcttacaaagatcttcataacacagttctagattctatatgtaaacatactaaagttgagagaattcaggattttatacttaaacaaaaacaaccctttactaaggaaagtattcgtaacacttatccagacattgcagagagtacaatcagtaaggctttaaattccttgcaactgtttggccatattaagctagttacaaaaggaagaaacgcaaagtggattaaaatttgaccatactttcaagatatctgagcttcaaaaattcaataataactttatcattgaatttcattttaattttaagctattattacttttttagttatttctaattccaacaaaacagtttataggaaaaggtccgcttccctccgccttttcctataataaaattaaatatagacatagaataattgtcgaaaaaagtcgtattttaatattttttctttattttctggttgtaaacgtttcactttcatgttaccatcttaatcaaacaatagatggtaacatgaaagtatttctttcccttagaaacatataaacgtacggtaatatcaagaaaataaggccaaagaaatatttgatacctaccaaaataattaataggaattttgcgcgttttttctgttaattcagaaaaaacattttgtccctaaacaaaatttgttagcgcgcaaactttaattacactagaacacccaaataaatgtactgtctttttaattgagcattaagatatgaaaaaagagttcttcctacaaaattcagctgatgaacttaaagatatctaaattactaccttaaacgccatctattgttgacaatatatttatcaactatgaaaaagagcctatcaagggttcttttttgttatgatcattcaaatttcaattctatcttgatacttagattcccccacaaatcacctctactttttttgctctcaattattaatttccgttcccaatttaattgaatttgtgaataaaattccatcttataaaaataataaatacaactaatcgttatatattaaagaggtgtcaattttgtctttaaatgaagagattttagaaactaaaacagataaaaacattgaaaagatccaaacaaataacttaaaacaacttaaaaatacactagataatatctttgatattagtgcagatttaattgaacatcctttgcaattaaaaacaagcacaaatattttactatattattttgaaggacttacagatagtgtcgcattaaaaagcaatgttgttacaccattattacaaaaagtgaatgaagacagtcaaatatttaattctaatattattgctactcataccaaaatagtatatacatggaatgaaattaaagaaggattacttgaggggcaatgtgtactatttatggaaggagaaaatcggtcacttctaataaatacaaaaggctgggcagagagagcaattcaagagccaatttcagaagttactattaaaggatcacatgatggtttcattgaaaatgccacaaaaaatataggcttaattcgtcgatatcttccttctgcagagttaaaaatcaaaaagttgacgattggagaacgggccacttctttcgtatacttaatttacttaggtgatgtagcaaacgcagatgtagtccaagaagtagaaaccagaatctgtaaaattaaaacagatgcaatattgagcattggtgaactatctaattttacaaaggatcaaaattggtctccttttccacaggcttatttaagcgaacgcccagatgctatttcaaatcatatacttgatggaaaagtagcggtgttaatggatagatcccctggcgcaatgattgttccaatgaatttaattggattctttcaaactccagatgattataatattcattggctcgttgcatcattttttcgcttattacgatttgcaggatttattatagctatttttttaccagcattttatatagctatagtctcttttcactttgaaatcattcctatagatttatacacttctattgcaacgtcaagagtcaaagtccctttctctcccttattggaagcttttataatggaaatcacactagaaatgctacgtgaagcgggtattcgcttaccacaaccaattggacaaaccattggaatagttggaggaattgtaattggacaagcggctgttcaagctggtcttgttagtaacgttatggttatcatcgtatctattacagccattgcttcatttattgtttctaattatgatttatcaagttctatacgccttattcgttttccaatgatgttattggcttacttttatggcattgtaggtattgttagtggattaatgctcttatttgctcattttgtttcactaacttcatatggttcaccatatggattgccaatcgcgccatttcgtctccaagagttaaaagattcttttgtaagatttcctatttctatgcttaccagccgttcgagtacagggcagccgaaacaaagaaagaaaaaagaaggtggttaacatggggaatcttaaatttaaaaatataactttattcgaatttattattttcatccattcgctgcaacttgcatctggtatgttaattatgccaagcccacttgcaactactgctggcacagatggctggatttcaatcattcttggatggatggttacttctataatcggtgtatttattatattaatgttacaaaaaaatcctaacaaaaatttctcacaaatcttaaaaacatactttggtaaatggatagggacaattctttttcttacatatgccttttatctattttttgctggatttaatactttattaaaggcaactgatattgtaaaagtgtggatattcccttccactcctgcttatcaaatcaccatattattactattaccttttattattttagccttgagtgggttaagggctcttactagttattctatgcttgttttcttcttcactacttggatgccactatttcttcttttttcactaaagagtaactacaatcctttacacctactacctatttttaaagagggattataccctattttaaaggcaacaaaagaaactattactccttatgctggcttagaaattgcatattatatatatccgttcttacaaaaaaaacaaaaggccataaaaggactactaatagcgaatactggaaccatgtttttctatctatatgttactattctttcttatatatactttagtccagaggggataaaagacgtaatttggcccgtatttcatttgttacaaggggttcgtttttctttcatggaacgattagaaattatttatatcgcttactatttaattgtattctccactactttatatccgtatttatttttcagttttgaatctatgaccatatcacttcaaaaaaacgcccgaaattgggcgctgcttgcttttatgttatttatagttgggctatttattttcctaaatcccgatgtggatgaatatttgtttatatattctcttatggatatcttaaatgtcattttctttattctattaccaatcttatttttcgcttacagtattctttttacttggattactaggaggaaacaactttgattcgaaaatggatatggattgtaatttgttgtgtgtatataattggttgtagtcagagaattcctcttgagaaggtttcattaatccttttaattggcttggatagaacctctaatggaaacataaaagttggaacaagcataccactctttcatcataagcagcaaaaaagtactatagagcattggacacaagcatcaactgtatataatggattcagtaagatagatacgaagttaacgggatatctgacagcttccaaagctgaaatcattttaattgggaaaaaattagcgcaagaagcaaattggttgcaggagcttgattcttcttaccgtgatccttacgctaccattaatgctaaagtagtacttgtagatgggcctgcagaagaaatttttaaaatttataagcctagtaaaccatcactatcatcttatataaatggtgtaatcgaatcctcaattcaaaataaccaatccgtctcttctacaattcagcaattaatgagagaacaaaatgaagatggaatgacgcaaactgttccaattatcaaaaaaacaaagaatgaaatcgacacagtaggaattgcatttttaaatcgaaaagggaaatatttgacttatatccctaaaaaagatgttaaatttttcaatcttataaataagccaaaaagtaacgggcgaatgatactacaccttgcacttcctcctaaaaattccaacaaaaaaacaaatacttctatcttcgtacagaacgcgacaaggaaggtagatgttacttttcaaaacggaaagtttgtatttaatctcgatatatatgctaatgtagctttaatagaaaaaaccaatcctaatttaattaaggggtactatgataataaaaaaaatataaataatttaaaaagtgctattcaaaaagaaattaataataatttacaaaatatgttgtatgaaatacagcagaataaaattgatccaatcggattatccctatatgctaaagcatttcaatataaagagtggaaaaaagtaaaaggagattggtcgcaagcgttagcagaggctaaaataaatgtaaagacacacgtcaaaataaaagatactgggaccattagaaattagtctaatatttaatagcatttcttaatagaattttccctcttcaataattattatgtaaaagatactaattcaaagaaagatctaatggttaaatgctaactactagatctttctttttatctaagtatttttttaggattacaattttcctatagtaaacaagcacaggtttctaaattaagttactggagaatatataactctggtgcaatatccctaccagctttcattccaataataactccatgatataacgtcaaagatgaaatcccttaacttaggtatttgactttttaaatttatacaaatgtcttagctctatgtactgtgatatataggtccacatcaatatgttattgcatcatatactgaacagataatttaaattacttttataaaggatgatgaggatgaacttagaagatatacaaaaatcctatggcgtaattgtaagtttaggaggattgtgtcaagtcaccaaccaaatcaaaagacacaatttaagaacattttctggacctttagattggttttattatccatcactttcagatgtaaacagattacttcaaaatcgatttaaaaaatttatgaagttggaaaatatggttatagaaggttcagaaagttacggtcttattgaatcagaatttgataatcaaattaaatgggcagaacgaattacctactgtataaaggacacttattataattgtttttcaatgcatgattttcctattaattcagaaaaggatttgaaatcaacctatccttcttttaaagctaaattagacactagaattaatcgattctttgaaaaaataaatagtagtgaatccattttattcattagaatttggggaaatcgagatgaagcggttgaattacaaaacgtattatctaaaattacaaataaggattttaatatccttattgttaatttcaaggagggtatatctaatattgttgaacaaaattggggaatatcgagggtttgttcaattgaactcccacgttatcaggatagatgggaaggtgatgattccgattgggatgttattttaaacaaaataacattaacttaataattttcttcttacttttaacatgatttggcccgtaaaatcaaataggtgtagagaaataaaattcctgtctaattgatacacacttaattaacaaaacgttcatataataattcgtaagtccttctttattgaataaatagttctttacaaaattagttccatcactagagcacctttatgcggtgctcttttttgaatttataaaatgtaaaaatagttgttccattttccttcaaatggctaattccctttgttattcttctgttgatttctgtataatcatttatgcgatcagcatattctgcttatgtagtgcattcacgactacttacttccatactttatcttatattttgtcttcttggatatttcattataagcttcttcaattcccttgatttccttccccttcttttatcttaagaacaagcaatttctttcatcaatattaaataaactaaagcatagattttaaaagaacctaatttacatataattaatgataaactacaatgtgtattctccacgtttaatcaacatctgaattataaatctaacatattttttttagttgattgtcattatgtataaatgctaacttaaatatgtacattaacgcttgaataaatatgtacattttcaattggattctccatactgactttatactgtttaaaagtttgttcatttcaattaatggaaaaccgtagagtttctatccttaagttgatgggcatggggaaagcacaccaatgaaaaaagcatgtccctcaattactttgggtcatgctttttttgtcgtaacatgatttacaatatatctcttgtgctgtttttgccaaacacacatcaaaagggccaactaatatacttctttctttcggcaactttacaaaagcaacaagctcttcttcatattgaatttttttctgacatgaaatacatattaattcttttcttttgaacatttcttttagcataccttcactctccccttcatctatctatattaatatactctcataatagttaagacttgtaaaaaaatgacacattccgaatcgaatgattcatatactatgtacaaaaggaggtctacagcttatgcgtgctttcgttattatcgctttaacttttttaagtgtgattagttgggatgcgtttttcaaagataaaagtgatgaaaagaatacaacggaataaaacctttttttcttacttattggacaaaccgttacaaactgtccaatcctccgaaataacttaggcttttctacaaaaatatttaaacataacattttttgtagattccctccgtttattgtcggtttccatccgcatacattttttaaaagtatgatataatagtataaatcttgaaggaagggattttgatatcatgatcgctcgaaggagcatgtggcatcgtattgacgaatcatacacgtagcgtatttttcagctcagatactttagtctagcgaaaaaaatacgagagtggggaaattatgattgcccgaaggataatttggcaaaaaaaagactcttcttacacatagcgttttgtttaggacttaattgttactaactaaacaaaacaaagaagagcaggattgctaaatgaagaatcctactccacgttttgtttagtcgttttaagacttaaactaaaacgaaggtagggagaattgatggacgagaggattattcgttatttcttcagcgacatatagcgtagttagttttttcgtaaactaactgaaagctacatgtgagctcgtagttagtttacaacacaaaaaggactactaactacggaaagaaggaataacgatgaggaacatccaaagtcggcaaattattaaagaaatttttatggttttaatcggttcatttattttagcagcagcgctatatcacattcacttccaaaaccacttaacagaaggtggctttgtaggaattgcactattcattcaaaacttttatgatatttcaccatctatttcaactgtattaatggatatcccaattattttactgtgtgcttcatttttaggtagaaaaatggttggctattcattcctaggttcaatttcattcggagtattttattcctttatggaaaattattctccatttacggtagatttatcaaataacttatttatagctgcagtagttggcggtgcgttagctggtattggactcggttttatattgcgatttggcggtgcaaccggtggagacgatattttaacaattgtattaagtaaacgaactcgttttacaattgggcaaattttcttcgtctttgacgcgattgttcttgcgctttcattatattatttaaattggacagaaattgcttttactattctttcgattgccgtacaggcaaaaacattggatttaatttattatccaaaaacagaaaaaacagcagaaaagcagccagtatctgttccaatgtctaaaaaacatgcaacaaattaaaaaagcgaaaggcttcggcctctcgctttttttatgctcttttttctttctcgactatatggcgcacttgataaaatctatttgcaaattcagtaacgtttcttgttaaacgataattcactgtagatccaattgccattccaattaccggtataccttggaataatttacgacgaagagcataaatcgaaaatgtcttcaaaatttgttttaacacaacctcagtagaagctgtttgtagcactgcttcgtctccttcgtagaagaacgaatcttcttgctccagctcttgcaataaattgtaccatgcgtattgctgaagtcttcctggtagtaatgacgcatgaaacacctttaacgcaagcatcatttcatacggcttgttcacatcatgtccaaatgatgttgcaataagttggactgccttcacatttaatgcgatcataaccggaaaatccgccgttaataataataaacctccagcacctgttgccccgccttgtacaaatgaatatagacgatgacgtgctgtttgctgctctgctatgtatgttaattgatcaatagataatgctttcaaatcttcaagctgttcaatcgattcatcaaataatcttgatgttcctaaaatccgattacgtgcatctaactgtgcttgtgaactttgaataaatgcatgcaaatgaaagagccatccatctgctttcgtgaagaattcttttcgctttttctcaggtaatttcgcaactgtagtatgtaaccatttatcaaacactttttgaaaatcggtcgcttcttgctcaactaattgcgcttcccattcttttatattgtctaaaatggcttgttctcgcttcgatcgcatcgtaacaaccacctcgttcgatttttttctattgtaacatatttctgcttattctttgcaaatatgcttgtctatctttattcacataccatttttgaatggcataaaatattaacaaaaaggatgagataaatcacatgaatctatccgatataaaaaaagaatataatgcggtattcagcttaggacaaaactgctggcctgcttgggcattatatcaattagaattatcaccattttttggcgttattgattttatgctaagcccctcattagaaaaagtgaatgtattattacaaaatcgatttgaccgctttttaaatttcgaaaatttatccttcatctcattttgggatgatgatgcaaaattaagattaagggacaacctttatgaaattgactcctgtcatgactttaaaacagatgtaaacacaccaacttcttggccttcttatacagaaattaagttaaattatgaacatcgtattaatcgttttctagctacaattgaaacggccgaatccatattatttattcgaactggaggaacatatgaagaagcatgttccctagaacaaattttatctcaaatcgttacacatacattctctgtcctgttactaattcctgccgatataccaactatcacccaagaagattggggattacaacgtgtttgcgttatgaaatgtcctattatggatgtataccaatacaatgaagcattttggaaagacttatttgatggaattacgattagaccacattcttaaatacatgacacctttactacaaaacatattataatcttccttatacaaaaaaataaggagtgattgtatatgtatccacgtgcaaaggcttttggcattgctatacatcacgggcgtcttctcgtacaagaatatcattcagccgatgaaacattttaccgacctcttggtggttcaattgaacttggtgaacaatcagcacataccgttattcgtgaatttagggaagagcttcatacagaagtggaaatcaccaattatttaggctgtttagaaaatgtctttcatctagatggagacattggtcatgaaattattcaactatattctttgcgtttattagacacgtcactatatgaaatgaaaatattaaatatacaagatgaggaaacagtagcatatgcgaaatggattcctattacggcattcattcagaaagaaaaaatattatatccggatggagttttaaaatacatctaaaagaaaaaagacgaaatcctataggatctcgtcttttttttcatatattaaccaatatctccaagacgtagtacgtcacgagcaatcataacttcttcgtcagttggaattacgataatttttactggagagtgtgggaagctgatgaatgcttcttcaccgaatacgttattacgttttgcatcgaagtatacgcccatgtactcaaggccttctaatacgcgctcacgaataatcgcactgttttcacctacaccagctgtgaagatgattgcgtctacacctttcatacgagcagtgtaagaaccgatgtatttgtggatacggcttacgaatacatcaagtgctactttcgcacggtggtcgccttcttcttctttcgcaatgatgtcacgtaggtcactagagtaaccagtaagacctaacataccactcttcttgtttaatacgttaactacttcttctactgtttggcctgttttttccatgatgtatggaattaacgcagggtcaaggttaccagaacgtgtacccattgttacaccagcaagtggagtgaagcccatagaagtatcaatagatttaccgccttctactgctgcgatacttgcaccgttacctaagtgacaagaaagtaagcttaagctttcaattggacgacctaataattcagccgcacgctcagttacatatttatgagaagttccgtggaaaccgtatttacggatgccgaatttttcatagtactcatatggtaagctgtataggaatgcagattccggcattgtttggtggaatgctgtatcgaatactgctactgctggtacgtttggtaatacttcttggaatgctttaataccaacaacgtttgctgggttatgaagtggtgctaaatcgcttaattcttcgatatcagctaatacttcatcagtaattaaaacagagtcagcaaatttttcgccgccgtgaacaacacggtgaccgataccgccaatctcatctagagatttaacgattccgttttcagttaactttttaagaagcatattaactgctactgcgtgatctggaatgtttgtaatttctttttgtttttcgccatctacagtaatagtgaagatactatcttctaaaccgatacgttctactaaaccttttgttaatactgtttcacttggcatttcaaataattggaattttaaggaagagcttcctgcgttaatcgcgatgatttttgacatctagtctttcgcccctttttctcttggtagttgtgtggatgtttccacaaaccgctcgattttatctgatcaaattcactaaatatgaaaacgtttcatcattagcaaattttatactcacgattttaatttaaacatcgtccgacatatatttcaagtgaaaaaattgtaacaccaagaaaaaatatatattacagatttcaaaaaaattcagttaaatcttgtatatatttaaaaatatgacatattatataaaactgtactacataaatcactaatgctgttacatatacctagctttatttatgtgttgcaaaccaagtatttaattgatccataatgtcttccatcgccttcatattagagaatttaggcaactccactaataacgcctgttttggcattgttacattagcgcctttcttttggagaacaaatatactttttgcatttttctcgtttttaaacatggaaacaggaagctgtaataacccttgaataaagcatgtttctttaataaatgcatgtaatttcggtgcttggtcactttcaaaaatgaagtttggtactaagaagaataagtaaccgccctctttcgtatgtttcacactttgttcaataaataagtgatgggcatacgacattccttcatctgcttttaatttatattcacttgcaccgatttcgtttggataataaccaaccggtaagtctgaaacgactgcatcaactggatcgatataaagtggtgctagtccatcttgatggaagaattcgattgcatgcttttgtaaatttgcatttactaaagcaagtttaattagcacttcatccacttctacaccaaatccactcattgttagtccttctttagcgctattaaacactgtagtcattaagttacctgttccaattgcaggatctaaaactgtaatttcattttgaccttgcataaatttatggaataagtaactcatgaacatcccaactgcatcaggtgtcatttcgtgattcgcttgtacgccttctttcattccttttaagatggctaactgaaatgctttacgaatttcttcacctttatatgtttcttcattaaacgtactatattcacgattcagcctttcaattgctgattcggataattcctcttgtaaaatcgctccctcaaacaagttatcacctgtttctacaagcgcctctaaatatgttacatctaattctttacgtaaaactaccgcagaagaatcaaaaatagaaaataatgtttctactgtctgactcacgtacattcctccttctctcttttacacataacttatatcataccacaaagtgattttttccaaaaagaaaaagcgacctcctgtaaagagctcccctttagttatatatgatataacgttttttctcatatatcgatgccgttacagagcaatatatgagaaaaaacgacctctttataagaggtcattttcttcacattacttcgcagatttagctgcttctaatgctgcttcatagtttggatggcttgtaccttcgcttacgtattctacgtaaactactttgtcattgctatctactacgaatactgcacgagcaagtaaacgaagttctttcattactaagccgtaagcttcaccgaatgaaaggtcgcggtggtcagaaagtgttacaacattttctaaaccgtttgctgcacaccagcgtttttgagcgaatggtaaatcagcgctaattgttaatactttcgcgttttcaatacctgctgcatcttggttaaaacgacgtgtttgtgcatcacacacacctgtgtcgattgaaggtacaacactaattaatttcacttcgcctttgtatgtttctaaacttactggagataagtcgtttgctaatacttggaagtttggcgcttgatcgccaactttaacttctgttccaactaaagtcattggattacctttaaaagttacgtttgccacttgaaaatcctcccttatttaaacaaaatatgtacaatgtaaatgatagtttgtccctatcgataatgcaaataaaatcgctttatttacaaaaaaattaaagaagctaacctattgattagcttctttattcgttaaatttgaaattcaggatcatcttcttttcgtttatccatcatttctttcactttatcaacagcttgtggcgctaattcaattattttatcgatgacatgtgtttgtttatctaagtgcaatactttcacaccatctccatttataacaagaaaggcaacaggattaatagaaactcctccaccacttcccccgccaaatggatggcggcctgaatgttctactttaccaaattcacttccaccagcagcaaacccgaaacttactttcgaaacagtaagaattacacttccatctgccgctttaattgggtcaccaacaattgtatttacatcagtcatttgttttaaatgctgcattgctgttgtcattaaaccttgaattggatgttccattctatatcccccctatgcttgaacagatttttctgtcataccagatctttgcttcctcataaatatgagcaatttcaccgctgtttttatagtgcggaatatacgaaaagatgctgttaactcacatcttgatgcaaatccttttccttgaaaaactggggtaatttcaaattctggtacgtcgacaatatgcatatattgtccgacaactccagcagccataccttttgtcccccatgcatatccagtgacaattccagtactagctgcgtcgcctgctccaatttgtgtatgccatttccaaccattgattttcactcgtttgagaaaatctttaacaatagtatgaacttcttgaagcttttttatcagttcaccaatgctgtcaagttgcgccataattttattatcgagtccgccgtcctcttcagctttttcgattttctgtcctgtctttttctgctgtttttcaattctttccaacacatcaaatgtatatcgaatcatccatattttcacttgaagcaaacatttcttttccatttctgaatataaaaatgtcaccttaagctttatttttgacaatagtataaacaaaataaaaagaagaagaattattattccaattacgagccacttcatacgtatcatcctttcactccgtacccattatcgacaactttattcatcattaaacagagttctataagattgaatataaaaatttttctaaaaataaaaaggtgttttgacattttatatcgaaatatattatttgaacatatcatcagggaacggactctaatgatatgtagcacgaaaaacagaaaatttaactgcagtggagggatacataatggcagatcgtcgcaatttatttttcttttatggtgatgacaaagcaacgctcgttgaaaaaatgaaaccaatctatcgtattttagaagagaatggatttaccatattagatcatccaaaaaatgcaaacgctatcgtcagtgttggagatgatgcaaccttcttacaaaccgttcgtaaaactggttttagggaagattgcttatacgcagggatttctacgaaagatgaaacttcgttctactgtgatttccatattgatcacgttgatacagcccttcaagaaattacaaaaaatgaaattgaagtgcgtaaatatccaacaattcaggtagatgtagatcacagtacatctttccattgtttaaatgagttctcattacgttctagtattataaaaacattcgttgtagatgttcacgttgatgatttatatttcgaaacatttagaggtgacggtttagtagtttctaccccaacaggaagtactgcttacaataaatcattgcatggcgcagttgttgacccacttattccatgtttccaagtaagcgaactagcatctttaaacaacaacacttaccgtacgctcggttcacctttcattttaaatcacgaacgtacattaactttaaaactaagaccagacggtaacgattatcctgttatcggcatggataacgaagcgcttagcattaaacaagtggaaaaagctgttgtacgcttaagcgataaacaaattaaaacagttaaattaaaaaacaattctttctgggaaaaagtacagagaacgtttttataggattaaaataaccgcagaattatggaattccataattctgcggttatttatttaccccgattggcgcggacaatactctcttactatccacccgttattcttgtcagtttttgtcggtaagtcgatatattttaataatcgctcatatatttcgagttacgatagatatatttcaataatcgcttatatatttcgagttacagtcgatatattccgaaaatcgctgatatatttttacgcattttttctatagacaacttggccatctattacggtcatttctgcttctacttcttttatttcttctgcctcaatttcaaaaatattgcggtctaatattgtaaagtctgcttcatatccttttgtaatttgccctcgcttcgcttcttttccgattgcataggaacttcctgttgtaaataaagaaacagcctcatataccgttaatctttcctcaggcatatagcatacaccgtcaataaaacttctacgtgtaacagcgctatatatacctagaaacggatttacttgttcaatgggggcatctgagccaccattacaatgtagccctgcttccagtaatgtcttccaagcatacgcataacgaagacggcgctctcctagtttttcaatgactgacggaaaatctgatgaaagaaagactggctgtatatctataatgacttgcaagtttttcattctttcaattaactcctcacgagcaagctgacaatgaataatgcggtcacgtaacccttttgctggtggatataattcgagtgcatcaatgacatattcaagcgataaatcaccgatagtatgaatcgcaactggcatatgtaaatctcgtgctttcttcactaattctgcaagttcttcacatgagaaaatcgcaaccccattcgtttccttcgcatcttcatacggttcacttaataatgctgttcttccgccaaaagaaccgtcagaaaaaattttcattgccccaaattcaatataatgttcattttcatattcttttcgttcatgtgctacttcatggtgaacgagcaaatgggctttaaatggcatttcttttatcacatgagaaaacgcattatgcgtttttctaaaaccaccataataatttaaatcttccgtatgcccgccaacaagtccgtatttccagcaatctttaatcgctgtttgcagagctctttgtaaataagcttcatcaatttctggctgaacatgtttaattaattcttgcccttgttcatataaaagtcctgttaacttatttgatgaatctctgccaattttcccgccttttggatcttctgtcgcttctgttatattcgcttcttgcagtatgtatgaattcacccatgtaacgtgacgacaaactctctttaataaaataggatggtctttcgaaatttcatctaaatcacgcgcgtgaacatctttcgtatctgtaaagttattttcattccatccttctccaataatccaagagccctttggagcttcttccactcgcttctgaacaagagtcagtacttcgctataagatgtacaatttgataaatctagacggagtaatctctctccatgcccaataagatgcatatggctatcaacgagacctgggatcattgtttttccttttaggtcatgtaactttacgtttgaatatctgctttctaattctcccttattaccagcatcaacaattatgccgttttcaacgtaaacagcgtccactttttcattttcttctctcattgtgtaaatggtgccgccataccaaatttctcccatatatcccatctcctttattttttattgtataaaaaaagcaccatttcaaaacatggtgcttttctaaaaattacttttgttcagtagtagacgttgtaacttgccattcaatattaaatttatcttttacttgtccgtatgctgggctccagaatgtttcttgaagtggcatgataacttctccaccttcttgtaacttatcgaatacttcttttgctttttctgcattactaatttgaattgcgattgttacttgagatccgtttgcatgtccttgacctgggaatgtatcagaaatcataagatccgtattaccaacttttaaagtagcgtgtaaaacgcgctctttcgcttcagctggaatcgggtattctggattttcaggcatgtcaccaaaagtttgcatgacttctacttttgcatctaaagcctctttataaaactgtacagcttcttgcccactaccatctaaaactaagtacggattaatacctaaaatcatacggacacctcttttttaagtttataaaatcgaacttgtgttcgtttttatattatcattgttttgcatttcattcaactatttacttcactgttttcaaaattattttgacggaatctccatctcttgttttctaagttcaatacggcgaatttttccagaaatcgtttttggtagttcatctacaaattcaattttgcgagggtatttatatggtgcagtgagttctttgacgtgttgttggagtgttggaattaatgtttcttcgttcttttctatattctctcttaatacgataaatgccttcacgacacttccacgaatttcatcaggacttgcgacaactgcacattctcttacgtaaggatgttttacaagtgcatcctctacttcaaacggcccgattgtataaccagagctaataatgatatcatcaccgcgcccttcaaaccagaagtagccgtcttcatctttcttcgctttatcacctgtaatataataatcaccgcggaattgcatcgctgtacgttcatcgtctttgtaatattgtttaaagagggccggcgtttcaatgtgaactgcaatatcaccaacttcgcctactttaactggagtaccttcctcatttacgatatcgacgtggttacctggcgttggtttccccattgaacctggtctaatatccatccctttcattacaccaacaagtaatgtattttccgtttgcccatagccgtctctcactgtaatatgaaagtgcttttggaacgttccaatgacttctctatttaacggctcacctgctgatacagcgctatgtaatgcctctaaattgtactgacttaaatcttctacctttgccattaatctatactcagtcggtgtacaacaaagtacattcaccttattatcgtctaataagtttaggtacgtttccggttcaaacttaccgtgatatacaaaccctgttgcccctgatcctagcgttgctaaaaacgggctccaaatccacttttgccagcctggactagctgttgcccatacaatatcattctcttcaattccgagccaatttggagcgctcgtacgtaaatgagcgtatgcccaagcatgtgtatgaacgacaccttttggatttcctgtcgttcctgacgtgtaagataaaaagaccatatcttctttatctgtcttcgccatttctaacatgtcactctctgtttctaacgctgtttttaaattaatccatccatctactgactgctcgctcaggacaaatttccgaagagattccatcgcttctatatcatcaaactgcctaatatacggctcatagcttactatcgcttttacttctccatgtccaattcgatattctatatcttttttacgtaacatttccgagcttggaattacgacaaatcctgctttaatagcagcaatatacgtcatgtacgcttcaattaaacgcggcatcataatgagaagcttgtcccctttttgcaaaccactttttataaaagcgtttccaattttattcgcaccttgcattaattcagcgtatgtaacttcccttcgattccctttatcatcttgccaaattaaagctaatttccctttatcacccgtatatttctctatttcagaaactaaattataagacggtggcgccaacaattcttctctcttcataaaatatcctcccttttctttatgcctcctttatataataaagaattttctgttaattttgaaccctcttcttttgacaaatttttcagttctgtcgaattactaaatgaaattacatcaacttaccgacaaatggcaacacaaaaaagaaagagcgggagaacccgctctttctaagccatcatatgggattatttttggtaaccgcctaattgttgctcagctagtgaaactagacgtttagtgatttcaccaccaacagaaccgttagcgcgagctgttgcatcagctccaagttgaacaccaaactcttgagcgatttcgtatttcatttggtctaatgctgattcagcaccaggaaccgctaatttatttgtgctacgtgacatgttatatcacctccttgtgagtatagagtgtgataaataacatgacttcatacacgttttaaatatggtaatttatggttttagaaaagttcttcaaatttttcttcttccgccactacttctaccgtttgtaataccattgtttctttgttcgctacagcttcatcgattaatggtgtgaaatcgtatttcgcttcaaaacgatttgctttttcacgtttcggcttcgtcgctgggcttgctggtgtaaatacagtacagcaatcttcatatggacgaattgaaatatcatacgtgccgatttcttcagagattttaataatctctaatttatccatcgtaataagcggacgaataactgggtagtttgttacttcgttaatcgtatgcatactatctaacgtttggcttgctacttgtccaagactttcaccagtcgtaattgcaagtgcgttacgctcctcagcaatacgttctgtaatacgcatcatcatacggcgcataaccgtcattgaatagctagatggaatttctttattaatcgttttttgcacttctgtaaacggaacaaggtgaagcgttactcgtttacaatacttcgttaactcttgcgctaaatcgattactttttgttttgcacgctcacttgtgaaaggtggactatggaagtgaactgcttccacagatacgccgcgtttcatcgttaagtaagctgctactgggctatcaataccaccagaaagaagtaccattacttttccgccaacgccaactggtaaaccgccagctcccatacgctcatcacacataatgtagctataaccactgcgaatttctacgcgtacatttacatctggattatgaacatctactgtaatatcttctgtgttttctagaatgtgtccgccaatctcaggtaataattccatcgttctcattgggaaatgcttataagaacggtgtacagtaattttaaatgttttcacatcaccttttacttgtaagaaagctgctaatgcaccttctttaatgtcttctaattctgatggtactttcatcgctaagttaaatttatgaataccgaatacatctttcaatctttcagagactgcttcatgatcttcaccatttaactggatgtacatacgatcatgtgttgcatcgattttaatatttgggaattttttcagtttgaacttcacgttatcttttaatgtgcttacaaacttagaacggttcttaccttttgtcgtcatttctccgtaacgcactaaaatatattcatatttcaacataatttctttacctcatcacttcatataattttggcatcgtctcttttacaataccttcaaattgttttacttcttccattgtgttttctggtgctaaactaatacgaatagcgcttgcagctgctgcatgcggcactcccattgacactaacactctgctcacttcatttgcttttgaagaacaagcagatttcgttgacacatatacaccgtgttcttctaaagcatgaacgactacttctggttttaaaccaacaaatgatacatttaaaatgtgcggtgctgcatatgcaagcgacgtgttaatcgttacatcttccatctctttaaagaaacgaacaagctctgcttgtaaactttgcaaatgagctaccttttctttcacttgttccattgtcatgcgaagtgctttcaccatcgctacaatgccaggtaaattttctgtaccagagcgatacttaagctcttgttgaccacctgataaaatcggatctaatcttacgccatcgcgtacataaagaagacctgttccttttacactgtggaatttatgtccagatattgagcaaagatcaatatgagaagcatataaatcaagcggtacttttcctatcccttgtacatgatctacatggaatcttattttcggatgattcgataataacgttccaatttcagcaacaggctgaattgctccagtttcgttgttcacatgaataattgacacaagaatcgtatcttcacgaagcgctcgtttcacatcttctaccgatacaacaccatgctcgttaaccggtaagtatgttacatcaaacccgagttcttctaattgcttatatgcttcaaacacagacgcgtgttcaatatttgttgtaatgatatgtttaccacgcgaacgattcctcatcgctatccctttaatcgcaaggttattcccttccgttccacctgatgtaaaaataatttcagaaggtttaacacgaagaagctgcgctgcaatcgttcttgattgtgttaatagacgctctgcctctcctccaagcgaatgaatagaagaaggattaccaaaatatttcccagcaaccgtcacgtacgattgaagagcttctggatatggcttagtcgtcgcactattatcaaaatagatcatcgttcttcccctttcagcgctatcacatcgtataatcatatcataaatacgtgtcattacgctaagactacgcaaaggttccgttttatctcgattggtgaaggctaataattggcgaggatgccctcctattacagtttcactttatcccgcgttaacgggcaataagactctcacctcaaaatccagttagagcaaagaagttagatgggagattaactgcccgtaaatgcccgattggtgaaggctagtaatcagtggggatgaatcttcccaccgattacagtttcactttattttgaaacgaataaccttactgtattccgctattcattatagcaacatcgcctgcaaaattacataaaaaaacaaacccttttatgaaagggtttgttcattgtctacatattcagctattttttgaacaacgccaggttcaagttgctctaacactgaagccgcttgttctaaagctgcatcgtattggtattcacggaataatttctcagcataatttaaactttctgctaggttttcatcatgactacggtaacggttaccgtactgaattaatttttccactaaatatgcttgtccaattaactcttctgtcatttcagctacaccgttcacagttgtgtatgcttcttctaaactgctatttacagcgttcatatttaacggcttcacttctaattgttcatatacagcttgcattgccatttgccctctttttaaatcttccataatactctctggaagacctggcaaattcgacttttgcataaagcgtttcgtttcgaaaataatatttcgcatttcttgtaacttctcacgtgcttcaaattcttctttgcgcatcgcttgcagcatttctttatattctgcatgaagtacttttaacgtttcacattgctcataaacctcttctagttcctcacgaataatagagaaggcaatatcttgttctgcaacgcgtaattgcagcatttcaaaacgtttcgttaaaatgtgcatttgcttttcaattactttttgagactcaatgtctttatcttgtaactgatagctttgtttcacaagttgtgtttctgttttcgtttcaatcgtttcgatacgcatttcttctaagtcatcgtaaacagaaagtgttttttgctccacataatgtctcgcatgtacttcttgttccaattgatcgtagaagccatctaaacgtgtttttaagttttctactttttcagccgcttctgttatatgaagctcctgtatatccattaaacatgtttgtagttgtttcgtcatatcgcgaacttctttagggacttccaaataatctaatacataaccttgtcttaccatatcattatgtccgtgtaataaatcttccagctgaactggtaacgtcgcttggcactctaccaataaatctggaatttggtgaataatgatttctaaatctgctaaaccttcttccaaactaataacaatttctctcgcttttaaatagtcgccattgtttgttgcttcttcaaaggttttaaatttctcagattcagcgtctagcatctcttcgattttctgctctgctgctccatacatatgtctatgagcaagaacactctttttcatactacgatatgtatcacgtaacccttcaatttccgagctatttttctcatggctttctaacaattgctgtaattcatttaaaatgtccgtaatacgattatcagcgtcatctaaaccacttatggattcgttcatcgcatgctttgcttttcggaaggagaattgcgaggcgaattttcgcgcttgcgctaaatctttgtcagctttcggaagggttgttgatacaatttcatcccattcttcacgccatttaccaaacagttcttctgtttgacccgtcatgtttaaatcttttacccgttttaattcatctgccacaggtttatcttttatctcttgtttccactgctccagtgcttcaatatctttatatgaacgatttcttatcacaagctctatcatgagcagcactagaatagagcttactacaatgataacgatcgtcaggatagaatccatgcaaaaaagcctcctagttatatctctttttttgtccgttccgtttatgaaatggaaggcattatgtataaaaagggaattcccctatatttaacaactaacaatgtactaatcataccatgtaatggtttgtttttgacctagtttttttaaaaatttcatgttcctttcaatgtgattgtaatctttctcaatattccgcctacctcactacctatcctcaaatgattgtaataacaaacaatctttcgtatgggatacgaaataaattttccgcatgagtggtggttcaacagagattacatgtacatttccttgccttacagactgctctactgccctttctggaagtaacgtgataccaaggccagcttttaccattgcaagcatcggttctgcgtaagatgtttccacagctatagttggttttacacctatttcatgaaacatgttcataatcattttccttacatcacatatttctggatatacaattaatttttcattgtgcagctcttctatttgaatgactaccttctctttgtacggatgattatttgaaacggcacaaacaattttctcttgttgcacttcttttatatacgtaacaccttctactactgaatcgatgaacatcgcgtcaatctcccgcgctttaaataaatctcttaatacttccgtatgaccgatttgccattccacttcgaactcatcacctaatatatctttacattctgatatgtaatgctccgctaaactcggtagtataccaattgaaaacttccggttctcttgataccccctcatttctgttttcacttcatttatttgctccaaaatcggtaacattctttttataaataactctcctgcctccgttaactctactccttgcgccgaacgcttaagtaaagtaacctctaaatccgcttctaacttttgaatttgtttactaagcgctggttgagatatatgtaaaatcttacttgcctttgataaacttcgcgtatgcttcacttcaataaacgatcgtactgcctccaaatccatcgtacacacctctaacaaaaagttataaccgttataagaaatcgatatttcctcctataaacaattactctttatacttatttcatcaacttactataacgaaatgtaaaggggaaagatactcttgaacaaaaaacaaatgctactcggatcctttctatgcttactcgccgtcactgcctggggatttatgtttcctgtaatggcaaatgctctgcaatttatcgatccattcttcttcacaacgcttcgctatggatcagcagctattatttttcttattttgctattaattactgaaggaaagacttcactccgcttagaaaaaagaacactttctctattcttttacgggacagtcggtttcgcggggtatggttttctcgttttctacggacaacaacttgccggaccttccggagcaatccatgcagctatgattcaatcccttatgccactgattgccttatcactgcaatggataacgaaaaatcgccgcccacaaaactatacattcctttgtatgttcgttgcattacttggtgttatgcttgtcatttcaaaaggaaatattgaattactatttggagctgcaagccacttatcaacaaatatattgatgctatgcggcgttacttgctgggtcatttatacaaacgggggtgctcgttttcaatcttggtcaccacttaggtacacgacattaacttgtttatttggctccatttcactcatcgttattgttactttcttaacgtacacaaatatagttactatgccgtcactgcgtacagttgtgagcgttcgttttgaactcttttatatgtcgattatcgcaggcgttatcgctgtattttgctggaatatgggaaatcgctatatttcatctattaacggcatattatttatgaatttagttcctatccttgcactgattggttctatctttcgaggttatacagtcgataaaattgaaatcgctggagctgcattaacaattatcgcgctattatgtaacaatttatggcaaagaaaagtaaacataaaaatccccacctcagttcgttaggtggggattcttcacatatgaacagctcttggccattcatggtacatattcgctttacataatgcttgttccatccattgctcaatctctttcgtgtacatctctataaaaaatgtctcagacgggaaagaatggagtacttctgatatatattgtggatataaaaacggcatatttatcataccttttaattgcgtcataaacattgtaaatgatactttctgaaattcttgtttcatttgtccttgtctaatcatttgttctatataatatctttctttagaaaaataaacggtcatcacttcacgaattaatgtcgtatcaagcgaaagctctcggtagaagaaacgtgttagttctctattttcaaattgatatcgtaaaatccctcgcaccatttgcaccatcacatctttagccgacaaatactctctctgttcaaacgacatttcaatcacatgaatatatccttctaaaaaatcagtaataagctgttctaataaaccttgcttcccagcaaaataatatgaaatattcgctacattcacatccgctcgctttgcaatgtctcgcaccgacgttccatcataacctttcgtattaaacaacgatattgccgcatcaattactttttgtttcgtctgcttcatgcgctcacttcccttcaatgaacagctatagtttaaatttcttgacttttaagacaaattcctttaattttctatcgacaaagtcatgtgaaatacatcgtattttgctaatattttacacatctcgataaaaaaggagctgtttccatgtttactaaagaaagttatgcaggatctcgcgtgcagcaatatgagacagtaattaaacaactggatgcgttattaactggcgaatcaaacgtagtcgcaaacttatcaaatgcgtccgcattattaaaccaatttttagatcgcgttaattgggttggcttttacgtaacagaaggaaatcagcttgtccttggaccgttccaaggaatgcctgcttgcgtacgcattccatttggacgaggcgtttgcggcgtagcagctgaaacgaaaacaacgcagcttgtagcggacgttcaccaattcccaggtcacatcgcttgcgatagtgcttctaattcggaaatcgttgtaccgattgtgaaagaaggagctgtcattggtgtactggacattgatagtcctgaaaaaaatcgttttgatgaattagatcagcgctatttagaaaagtttgtggaaacactcctaaaacatatgtaaaaagaaaagagcgagttatcgatttagtacgtcctgtacaaaaccgatagctcactcttttttcattgattaacagtagatattttctttaatgcctgctctaaatcagaaacgatatcctcccacgattctaaaccgaccgataagcgtattaaattatcgaaaatgcccatttcttttcttagttccgctggaatcgcagcgtgcgtcatcgttgctggatgctgaattaacgtttctgtatctcctaaactcaccgcaattgtaataaagtgaagatcattaataaacgcttgcgtctcttcttttccgccttttactgaaaaagaaataacaccgcccccgcgtttcatttgacgagatgctaactccccttctggataccaaacaccttctaccgcatcatgttttcttaagaacgatacaattttttctgcattatcacaatgacgatccattcttactgctaacgtctttaacccacgtaataataaccacgcatcaaacggcgccataataccgccgatatcctttcgcatcgggcgaatcttttcagctaatgctttcgttttacaaattgttacacctgctacaacgtcaccgtgaccaccaatatattttgtcgcactatgcacaacagcgtcacagccaagctcaagcggcctttgtaaataaggtgaacaaaacgtattatcaacaataacaagtaagccttttcgcttcgcaacccgaatcacttgttttaaatcaattaatttcattgtcggattaattggtgtttcaacgaaaataagctttgtatttgggcgaattttattttcaatatcaacctctgtctccatatcacaaaacgaatgcgtaatcataaatttttcttctaacacttctaaaaaaccgtacgtgcatccgtataatccatttgaacaaataatatgatctccagcctttaaaaaaccgattaaagtcgctgaaatagctgccataccagatccgaaggcaagtgcctcttctcctccttctaacaccgccatacgttcttcaaataatttcacagttggatttccaagccgtgagtaaatataagatggatccactcccgcaaaactcgcctctccttgctgcgcagtctcaaatgtaaatgtagaagtttgaaataaaggtggtgttaaacttcctttatgttcctcagatgtataaccgtgatgaattaacgctgtctccatatgcttctttttcataaaaacatcccccttatgtttttattgccgcatattcatccataaaaatttgatgaacattttccttcattttatgtaagcgctttatttgtgtttctatctcttcttctatattgttttaaattccttcttatattaatttccaaaatttatatgcataaaacaaaaacgtactcgcttgacgaaactctgggtaaaagatataatagcgtttgtgtaaaataaaaaggcagccttgtaatgtgagtttatcgtttgtattttgttcctctacggaggtgtatctcgtaactccctgctgctggagcgaaggtacatgaaaacaaaatgcccgtaaatatcgattacgtctgtttttattttacgtaaataaaaacatttttaaaggaggagtcaactatggctcgttatacaggtccagcttggaaactgtctcgtcgtcttggaatctctctaagcggcacaggaaaagaattagaaaaacgcccttacgcaccaggtcctcacggtcctaaccaacgtaagaaactttcagaatacggtttacaattacaagagaaacaaaaacttcgtcacatgtacggcatgactgagcgtcaattccgtcgcacatttgaccaagcaggtaaaatgcctggtaagcacggcgaaaacttcatgatccttcttgaagctcgtcttgacaacttagtttaccgtatgggcttagctcgcactcgtcgtgcagctcgccaattagtaaaccacggtcacatcatggttgatggcgctcgcgtagatatcccatcttaccgtgtaaaacctggtcaaactatcagcgttcgcgaaaaatctaacagccttgttgttgttaaagaagcgatcgaagttaacaacttcgtaccagaatacttaactttcgatgctgacaaattagaagctacttacactcgtcacgctgagcgttctgagttaccagctgaaatcaacgaagcattaatcgtagagttctactctcgttaatctcggtactctgaaaagagtcgtattaaaagccttaggaaccttgttaattcaaggttcctgggctttttttatttatataaagcataaaaaagaatgtactgggggcaaaaaataatatggctggcgtgtgtatagaaatggataagtgtaagtaaaataataaaacctctgtaggtccgtagtacattcatcttattagtaattaataattattagcccttctttctttaaaattgttcattgttcttttatctacataagaagaaacttttccacttctaacgctgaaaaataccactttccatctattttaaatttcgggaaacgttcatcataaaagcaattttctctgatggaatttccactcatacatgtttgtctacacaattctttcatatcccaaaacatttttctatgttcaatatgatctagccgttttcgtaactcttctaagaaaagttcttcaatcttttgttcatctattttaatatcaagaatgttgttattcaccttctttcatactttcattttgcttatttcgttgttctactttcctttttataattagctcccgtacagctggtattaacggtgttaaaaatttcttccgctgttcctttgtaaggattactttcaccacatactcatattcatcacgaataatttgttcttcactcatcctctatcacatcttttctttttattccctttgtaagtgagtatcgtacacaattttccatcttccagaaaaacctttctgtcataatccgccagaatttcctcacgatttattctttctactttttcaccaacttcccaatatccagcacgaagcagaaactcagaatccccttctggaatcggtaattcataccatctaaagttattctagttacttcaataccttctctaataatcatttcatcaccctttcattatgaatatggataagttcgctttgagttttattaatacccttacaaaaataatcagttacgtaaacaacttctttgataaagagtttatgaaagcataaaaaagcccccaaacgctaaggaatttataaaggaattttttaaaagtatacggagtgggattctccacaaccgtaatacatgttttcatattgttaaaaccctcttaaggatgaaatatctatatatcttatttatgtaacttatgttatagtttcatatgttaattaattacaattctttttaaaaggagtatacgcaatgaaagcaaagaaactaatatgttttttagcattaccacttatgttagtagcgtgggtaggatgttctaagaacaatacagaagagaataagactgatagcttaaagatttcagagtcagaaaagaagaaagacgagtcaatagacaaagaagcagataagctaaacaaggaaaaagaagaattgcttgctaaaaaggaagaattgcttgctgaaaaggaaaaattgcttgctgaaaagaaagctaaggaagaaaaagaggtaacgaaaaagaaagaggatacagataaaaatgaagtctcaaacgataaaacagtaaaagaagctgtaattggagaaggtagaacactagctgaggaaagagagtatagagataagcagttaactaaaggttctagtgcatcttctcctttagagaagtatcaagaagatattaaggatacttctaatgacttaaagacggcagttcaatctattaaatccttagctgaaaaagatggaacgtggaaaacaactcaaacaggattaaagggagaattaagtagagtaagtgggagagctaatagactagcaagtatagaacctcctaaggagtatgattacttcaaagttcaattaagagacgatgcaagagcaattaaacaaatggtagaccaagcatttatagctttaaatgaaaatgatactgaaacagccaagttaaacataggtgctatgatagattatgtagatataatgtcttcaacattgaatgaaatacaaaatgtacaaaatggagtttaaaggggtatgtgccaaagaagcaaaatattgagatcggcaaattactagactcagaatcaataacaagtattttagctaactttgtaggtggaaaaacaaaatcagttgattatgatgacgaaaaagataaagataaagatgtagttataattaataaacttacattagttgttttagtcacctaatgcttccaaaatgaggatgaataaaacatttcaatagaaaagctgccaaagaaactaaaacctttctctggcagcctttatttatatatattaaagttatttattttcctctttctgaacatatacataagcatctttctgctctttatgtacatccaccttcgaattctctgcaagctgacccgcatttagcaaagaaaaaataatgagcgcttctagtgacatttcgttttaccactcctttctagttgttatacatttatcataccgcttacatgtgatttccgtatgaactcgaaaaggagattacaacaaaatggttacaagcatatgaatgcacgttataataaccataaaatgggaggtggattctttttgacaataaatcaaatggttcaactcggaagttcatttatgctatttattacttccgcactgatgagttggtatcaggggagtaatttaatagataatcctgatgaatggaaatatagcgctaagtttacaaattactttaaaggcaccgtttcaaattaccaagatatttatcaaatcgatttctttatatatgcggcaaaattttatccaacagcatttatcgttatgctagttagtttactttatatgctcatattaattctttatattctatttaaaagaaaagatccggcgatttaaatccatacataaaaaccccgaatcatagacttttcagcctacaattcggggtactatttgtttacattcgtttctaattagtaacgaattaagaaatatttcttcttaccgcggcgaatgattgtgaatttaccttcgatgcggtcgttttctgttacaacgtagtctaatgcttgtgtacgctcaccgtttacgtagattgcgccattcgttacatcttcacgtgcttgacgttttgatggagagattttgctttctacaagtaagtcgattaatactgtatcttctgcagtacgttctacagatggtacgtctttgaatccttgctcgatttcgcttgcagtcagttctgctacagaaccgctgaataatgcagctgaaattttaatcgcttgctctaatgcttcttcaccatgaacaagttttgtcatttcagaacctaatgctttttgtgctgcacgtttttctggcgcttcagctacttgcttttcaagctcaagaatttcttcatgagataagaatgtgaagtattttaagtatttaacaacgtcgcggtcatctgtgttaatccagaattggtagaactcgtaaggagttgttttctctgggtctaaccaaattgcgccgccttcggttttaccaaacttcgtaccgtcagatttagtaactagtggaattgttaaaccgaatgctttcgcatcttcttctgatttacggattaattcaagaccagctgtaatgttaccccattggtcactaccaccgatttgtagacggcaattatgttgctgatataagtttaagaagtcgtatgattgtaaaatcatgtaactaaactcagtgaatgaaataccagtttctaaacgagatgctactgtatcttttgctaacatatagtttaaaccgaagtttttaccgatatcgcgtaagaatgaaattacatctaagctaccaagccagtcgtagttgttagccatcgttgctgggttgtccacgttttcaaactctaagaagtttgaaagttggtttttaatgctttctgtgtagtaagcaactgtatctttcgtatttaatgtacgttctgcttttttaccactcgggtcaccgatcataccagtaccaccgccaacaagtgcgattggttggtgaccagctaattggaaacgacgtaacattaatactggtaacatatgaccaatgtgtaagctatccgctgtcgggtcgaaaccacagtataatttaacgctttctttttctaataattgctcaaggccctcagcatctgtttgctgattaattagaccgcgaaattcaagatcttgtaaaatacccatatcctacatactctcctttaagttcattactggcgtgaaggttgaaaacataaaaaaatcgccccttcaaataagggacgattttgattatcgcgttaccaccctagttgcaggcaaaaaagcctaccaccttatttacataacggcttagcaccgtcttttcccttttgaataaaattcaatcgaaaaaagatgctctaggggcgtaattcgcgatcatctatgtgctgattttcaccggccatcagctctctaaaacagggaaatgatcactacttctccctttccacgctcaattattcatatacttttctttataccatcatttatataggcatgtcaaatagaggtcaggtttcccttcttgtcaatcctttacaacaccataaagagtatcgtaataagagaaagaattggaaccccaactaataacgatacatgaaacacaatcgataaatcattcccaatggtcgcctccacaggatctttcgctggggaaccaagaaacccgattaatcgatcgaatcgacttaccgtttttggaaagtctggtatttctacatgatcactatctaaatgttgctttaacttatattcactcttaaagggattttcgctcaatttcgtccacctccagcaattgtttcaatttctttatcccgttatgaagtctcgatttcaccgttccaatcggaatgtttaatatctctgcaatttctttttgctgcatgtcatgataataagaaaggattaggaccgctctttgctcttctggaactttcaaaattgcttctcttactgtgagccgatcttcgtgagaaaattctttttccggaatcggcactaaaaatggcaaaagcgtacgccacttttttctcctatttaatttattaatcataagacgataaccaatttgaaataaatacgtttttattttacctttttcaagttcatacatatgtttcttacgctctagcgtcaaaaacgtatcttgcacaagatcgatacttaattgttcatctcggttaaatcgatataaaaatgtgtatagcgctggtttgattaaaacatatagtctttctcccgcttgtttatctccactttgatacgcaagcatgagctcctcctcaatcccaatctgcgccatgatttttgatctcctttattccttttaacgttaatgaaatacgggaaattaaatatgcaatcgcaataaaaatccacaattgtgattgatttgtaaaaaattgcacatatgggttttgaatcgtaaatcccatagtaactaaagtatttaacgcttgcacacatatgcatgcatacaacgcaaggcagatagaaatagtgtcaaatacattccagcgaaaatacacttttgtttttgtaaaatcaattttatatccatttttccgtactatatgttttctatcaaatggaataatgattgaaaacataacacccattataactccagctgtaagcattgatactctatatccaattggtatcggtaagaaaagaccacaagaaaatacaactataattccaattacagcaaaagtaagaagtaatttattagacatataaaagcctccctcatctattctttcataaatgtatacagacgaggaaggcacttcgttcaaatattattttagtttttttataatctttgcaggattcccgccaactactacattattaggcacatctttcgttacgacagcaccagatgcgatcaccgcattgtctccaattgttacacctggattaataattgctcttccgccaatccatacgttatcgccaattgtaactggttttccgtattctgatccgcttatgcgctctaccggatcaagcgggtgcgttgctgtataaatgtgaacacctggagctaacatacagttcactccgattgttactggacatacatctaaaatggtacagtcaaagttcgcgtaaaaattttcacccacatgaatgttatagccgtaatcacatctgaaagaagattcaagatgaatgttatctccagtcgttccgaatagttcttttacgatttcgctacgctcttttaattgtacttctggcgtttcatttaattttctcgttaatatacgagcttgctccctctcttgaactaaaactggatcagctggtatgtacatttcacctagtatcatcttttctttttctgttttcatcatactatcccctttaacttatatatataagttcatgatatcataaaaaagaaaggcctgaacatttttcgttcagacctttctctcttaatcttccatcgttgataagtcacctgttggtaagtttaactcccacgcttttaatacgcggcgcataattttaccacttctcgttttcggtaatttatctctaaattcaatttgtcgtggcgctgcatgagctgctaggcctttctttacaaattgacgaatttcttcttttaattcatcagatggttcgtatcctgctcgaagtgcgataaatgctttaataatttcgccgcgcaccggatcaggaataccaattacaccagcttctgcaacagcagcgtgctcaattaatttactttctacttcaaacggaccaacgcgctcacctgacgtcataattacatcgtcaatacgcccttggaaccagaagtatccatcttcatccatataggcagagtcacctgatacgtaccaatctcccggcatgaaataagattcatatttttgctcgttattccagatcccacgcatcatagatggccaacctttcgcaattgctaagttacccattgtgtaaggaggcacttcatttccttcattatcaacaatcgctgctttcacacctggaattggtttacccattgagcctggacggatttccatacaagggtagttacaaataacttgtccacctgtttctgtcatccaccacgtatcatgaatacgaagtccaaatgcgttcataccccagcgaattacttctggatttaacggctcaccaacgcttaatacgtggcgcacttgtgataagtcatattttttaattgcgtcttgtccagctcccattaacatacggaatgctgttggtgcgctgtaccaaaccgtcacaccgtaatcttgcagtgcttcataccaagcttctggactaaagcgtccacctaaaataacgtttgacgctccaactaaccacggtgcgaaaataccgtaagctgttccagttacccagcccgggtcagcagtacaccaatatacatcgtcttcttttaaatctaatacccacttcgccgtttgatagtgctgaaccattgcgttttgcgcatgaagcacaccttttggcttaccagtagaaccagacgtgtaatgtagaatcaagccgtcttcacggcctaaccattcaatatgtaattcttttgaagcttgttcaaataaaggattgaacgctaccgttttaccgccttcttctacattatctccaacaaggaaaactgtttttaaagccggtaaatcatttaatggtacgcgctctaacaattcaggcgttgtaattaacacctttgcttcgctatcttctaagcgatcgcgaactgcgccttccataaatgcttcaaatagcggtccaacaattgctcctaatttcactgcacctaaaagtgcgaaatataactctggagaacgtggcataaaaataaaaacgcgatcgcctttttctacatcgccataattcttaaggacgtttcctgctttattagaaaaatccttcatttccttaaatgtatatttctcttttcgcgatccatcttgataataaagagctactttattctttcgatcggatttcgcatgcttatcaattgcctcatacgccatatttactcggcctgtttcattccaagtaaagtttttattaacctcttcccagttaaaattcgcgtatgcctcatcataattcggcaaattattttctcctttaatgacaggaagcgtttctactttcatactttacatccccctcctatgtattctattatctattataatgacattatttaaaattttcagtatatttgttgatttttagacaaatttttaatgacaaatttcgattcacatcgcatatattataaagtacgatattaatagattcacaaaccctcaaggtggtgagcaatacattgattcataaaaaaatatataatgctagaaacttaaaaacggcgaaaggcactttaattattgaaggtcctgtctctacacataacttagaaatgtatgagtttcatccagacttaattgcgtttcgtcctgccgagcaacaatataaagcaattgtcgaaatttctaaattaccagaagctcgtctcattattgctagacatgaccaaacaattgttggatatgttacatacttgtatcctgatccacttgaacgatggtcagaaggaaaaatggaaaacttaattgagcttggggcaattgaagtagtcccagccttccgcgggagttctgtcggaaagaacttactagaggtttctatgatggacgattatatggaagattacattatattgacgactgaatattattggcactgggatttgaaacaaacaggattgaatgtgtgggaataccgaaaagtaatggagaagatgatgaatgctggcgggttacaatggatggctacagacgatcctgaaatttgttcacatcctgccaactgtttaatggtccgcatcggtaaacgcgttgatacggattctattcaagcttttgatcgtctacgttttcacaatcgttttatgtattaataaagggggcaactggaatgattgtagaagaaattatgaatcaaaatgtagttacattgcatccaaacgatacaatcgaaacagcaatccgaacgatacgcacgaaaggcattcggcacattccaattgtcgatcaaaataatcacgtcgtaggcattatttctgatcgggatgtaagagatgcaagtccgtctattctagatgaacaagtttcaatcgatatgctacagcaaccgctcgaacttattatgaaacatcctgttatgacttgccatcctctcgatttcgttgaggaaattgctactttattttttgaaaataaaattggctgtcttcctgttacaaaggccgggaagttagttggaatcatttctgaatctacagtactgcacacattagtaaaattaacaggagcacatcaaccaagttcgcaaattgaaattcaagtaaaaaacgaacctggtattcttggaaaagtcgttgctatttttagtgatttacaaataaatatcgtgagcgttctcgtctacccagcaaaagacgagaatgataaagtactcgttttccgcattcaaacgatgaatcctctaaaagtgattgatgcacttgaagcagaaggttaccgcgtattatggccaaacatcatggggatgcaagcatgagtagcgcgtttatttattcggatgactttcggggctattcatttagccctgatcatccttttaaccaactgcgcgtcacacttacgtatgatttattacaaaagggcggtttcatctctccctctcaaatcatctcaccacggatggctacagatgaagagatcgcctacgttcatacagaggagtacataaatgcggtaaaacgtgctggagaaggaaagttagaaaaatcaattgcaatgacatatggactcggaacagaagatacaccgatgttcccaaatatgcacgaagcaagcgcattgctcgttggcggtacgttaacagctgtcgatgctgttctttccggaaaagtaaaacacgcacttaatttgggcggcggcttacatcacggctttcgcggcaaagcatctggcttttgtatttataacgacagttctatcgcaataaaatatattcaaaagaaatacggtttacgcgtcttatatattgatacagatgctcatcacggtgatggcgtacagtggtcgttttatgatgaccctaacgtatgcaccatttcactgcatgaaactggtcgttatttattccctggaactggcgctgtaaacgaacgtggccaaggtaatggttatagttattcttttaatgttccactcgatgcttttacagaagatgaatcgttcttagaatcatatcgaactgttgtaacagaagttgcagcgtactttaaaccggatattattttaacgcaaaatggtgctgacgcacattattatgacccacttacacatctttgtgcgacaatgaatatttaccgcgaaataccgaagctcgctcgtgaaattgctaatgaatattgcgaaggtcgctggatcgctgtcggcggtggcggctatgaccattggcgtgtcgtaccaagagcatgggcactcatttggctcgaaatgaacaacatccaaaacatctcaggttatctccctccagaatggattgaagcttggaaaggacaagcagaaacagaacttcccctcacatgggaagatccagacaacatgtataaacctatcccccgtaaaccagaaattgaagaaaaaaacgcattaactgtagcgaaatcccttgaaattattcggaataatatgacaaaatctttatactaaacgaaaaggaggctcgtttttgaatagcctccttttatttaaagcttgctattattgtcgttttctgtcggtaagtcgatatattttaataatcgctgatatattccgagttacgccgatatattttgataatcgctgatatattccgagttgcgccgatatattctaataatcgctgatatattttcattttataacagtctggcccaacttttatgagaaaaggtcgtgatattatgtggacacaacaaataatcaacacgaaacgcggtacatttgaactctttacaaaaggaaatggcgaatcgctttgtattacacatcactattcacaatttaatgaaactggtgattactttgcggatgtttttactgctacgcatcgtgtatttctcattaatttacgagatactggtcgctctgtaaccgcccagtcagaaaacgaattaagcatgattgaaacaatccacgacttagaagcaatacgagaagcattacaacttccaacatggcatttcgccggtcattcaacaggtggtatgcttggacttttatatgcgattacatatccaaattccttacaatcattagtcgtagcaggagctgcagcaagtaactataccgaaacaccattttgcatttatcacccagcacatccacagtttcattatatgcaaaaacacatcgaaaacttaaaaagccctcaccttacaagtgaagaacgaaaagaactatctactgagagaacaaaattatcattgtataaaccagaaaactacaactcttatttttgtaaaccaatcaataaaacaatgtccgttagccggatgaacgctttcgccaatgaatatccttcatttgatttaagagagtatttacctttcatccaaacaaagacacttattatatgcggaagatatgatgtgcagtgtccagttcaatattctatcgagatacatgatgggatacgtaactctatcttcattccattcgaaaacagcaaccattatccttttttagaagaagcgaccctgtttacttctactactcaaatattttataaatcgttacgccagtaccgttattattaaggaaagctcacagtctctataagactatgagctaaattttcagaagaaatatttcgtactatataaaaataaaagataaaaggaaaagagcaccaaacctacatcaaacaacactgactttttatctccttcttttaaacctatcgtaatattaaaaatgcttctaactatccaacctaatactaaaaataaccagccgaaatgatcatttgtataatctttatcataaaacatttgtattgcaccaataattaataaaataattataatattagttccaatccttaagaccttgtttgatttattatcttgtaatgtatctcccaaaatgtagcacaccctctcatgctctactatgttttatctctctttatatcttaacacaaattacctattatttccttttgacaaataacataaaaaacctgccaattactcggcaggtatattacacgttaaaacgataaccagctccccatactgtttcaatatattgcgggtgagcaggatctctttcaattttttcacgtagctttctaatgtggacgacaacagtggctaaatcaccagcggaatctaatccccaaatgcgttcaaataactgttctttatttaatacttggtttggatgtgtaacaaagaatgttaataaatcaaattccttcgttgtaaacgcaacttcttcattgtttataaaaacttttctcgctcgttgatcgatagaaattccgtgaatatataacgtatcacgttgcttacttacatttcctaataatctttcataacgggcaatatgtgcttttactcttgcgactaattcactcgggctaaacggtttcgttatataatcatccgctcctaatccgagtccgcgaattttatctatatcttctttttttgctgaaacaagtagaatcggaatatcttttacagcacgtatttgtttacaaatttcgaatccgttcattttcggaagcataatatctaaaataattaaatcatagtcttcttgcagagctgtttgtaaacctatttctcctgaatgctctacatcaacttggaaatcattaatttctaaataatctcgctgtaattctgcaatacttacttcatcttctattaataaaattcttttcaatttactcaccacattcctctactttttccaatgagaagaaaatgcttgtgcctttaccaagctcgctttccgcccaaatttccccgccatgttcttcaacaatttgcttcgctattgctaaaccaagtccacttccacctgtgctagaattccgcgattgctctgcacgataaaaacgttcaaagatatacggcaatgtatcagcttctatacctgatccgttgtccatcactttcacaataactttattattatcactcgatactgttacagtaattttcttctcttctttatccatgtatttcacactattatgaactaaatttgatatcactctatttattttttcacaatcagccgttacatatagtgttgatgcatgtaattgtaagttaacttctataccttctttacttaaatccatctgcatctcttctattaattcttgcataaacgtatttaattcaactgtttcaaactggaatggaactcgattcaaatcgagcttcgaaaacaaaaagagttcatcaatgagtgtgtccatatgttttgccttcgtatggatagttgttaaatacttatccattttttctggcgtatttgctaccccgtcctttattccttctacatatcctataattgatgtaatcggtgtttttaagtcatgagagatgtttgaaataagctcttttcgattttcttcatactgtgtttgcatctctatcgattcttttaatctcttcctcatttcctcaaacccttgatttaattgccctatttcgtcgtgtgatgtaattggtatttgaaaatctaaatttccttctttaattttctccgttgcgcctttcaatacaaaaattggttttattacacttcttgaaacgaggtaacttaataatccaatgagtaaaatggctagtagtaaaagcgatacgaataagattggaaataatttttgtgtaagatctacaaatgaactttgcttttttaatacaaatatacttccctcttcttcctgaggaaaataaaaatcaaactttacatatcgataaaatgtatcgcctagttccgttgtaccacgactattaatatttgctgattcaaatttcggaagggcttcttttaaagatacactttcaaatacgtttgaagcatatgaaagtgtttctccttttcttactactattttcacaccctctttttctattgctgagacaaacgactcatctagcaattgagattgatgctgtttggctgctgacttcaactcaagataggcattctcttcttctggtgtaagcggcttttgaatgtaagaacttttatagaaatttttcactgcttccaagtcacctgttatcgaaaaaacgattaaaaatcccgcgactaatataagcgtaatggaaacgaggataacagcaatataagaaaataaaaaccttgttttaatagacatatcttaaatcctcactttatcaaaccttattatttataagcataaaaatatatgttcaattactcaagcgattttatagtaattttagcgtcagtttataaaaatttaatgttcctattttacagttgaaattaggaggttgaaattccatgttcaaaaaaacattcagtatgatatgttgcgtaatttttttacaaggatgctcgcaagaacaagaagtaaaaaaggagatgataaacatggagactgcactactagcagccactgaaaaaaatgaaacgaatactgttatatctttactaaaacaaggcgcaaatataaatgcgacggatagtcaaggacgcactccgcttatgattgctacatacaaaaatgatgtaaaaaccgcaaaggcacttatcgaagctggtgctgacgtaaatatccaagatgacatgaaaaataatccctttctatacgccggtgcggaaggttacttagacattttaaaattaacaattgatgctggtgcagatcctacgattacaaatcgttacggcggaacagctcttatcccagcctcagaacatggctatattgacgttataaaagaactcctcactcgaacaaatattgatgtaaatcatgtaaataacctgggatggacagctttaatggaagccatagtactaagtaacggaaacgaaacacagcaacaagtcattcgccttcttattgagcacggtgcagatgtaaatattccagacaatgatggtgttaccccgctagagcatgctcgcactcatcactttgaggagatagagaagattttgttagaggggaataagtaaaaaatgtactaaaaaatccgaagcgctcatcacttcggattttttaacaaccttatttatccataacaacaggaagctggaatgaaacaatcgttccttttccaagttcactttttatttctaatccagttccgtataactgttttaatcgtgcatccgtattcaataaacctattccctgtttttgattcggttttttcactaatatttcttttattttttcatctgacatgcctatcccatcatccgcaatcgaaatgtttataaatccactcacactctctatttttatatgaatgcttccaccctttgctttttttaatataccatgacgcacagcattctctactaatgtttgaatagaaaacggtggtactacacattctattccatcttcgacttccagcacgctctgtattctctttccaaatcgctctctttcaatataaaggtatgattgaagtaaatctaattcatgctgtataggtacggtttccgctaacacttcttcaccaaaactggctcttaaatacgttccaaactcaacaattaatttctccatcctaacaatatcaatttcacctaatgcagcaatcgtatttagtgtattaaacagaaaatgcggctgaatttgcgcctgaagccaagcaccttccattcttattcgctcatgaattgattgctttaactctgttaatgcattaattctcacttttaattccagtgcatctataggctttacaatgtaatcattcgccccagcaagaaatcctgtataaatatcttctggctgcgacctagcggttaacagtacaataggcaactctgcaatagagtattgggtacgaatcatttttgttaattcataacctgacattttcggcatcatcacatctactaatatcatatcccactccatatttaaccgctccaaaacctctcttccggttgttaccgtttcaagttcatattcatcttgtggtaatatactctttaatacttttaaatttataggatcatcatcaacagcaagaattctccttctattaccgactcgattatccttcatttcaacttgttttaattccactactttttcaattgtttcttttgacacaattagcatctcttctctttcagcaagtggtaatgtgaatgtaaaagtagagcctttgtgtaaaacggatgtaacagtaagtgttcccccgtgcatttccactaattgtttacaaatacttagcccaagtccaaatcctccactttcaccatatgaatcactaccttgttcatatggaaggaagattcgcttttgcgcttctttatcaattccaataccagtatctgtaacctgaatagccgcgtaattttttcgtttttcaacatcaattgtaatagccccttcatccgtaaatttaactgcattatgaagtaggttaaataaaatttgaataagacgattttggtcagctaatacaaatggaaaccgttcagggatattcgcgataatttgtaatttcttttcttctccaataaacttttgcatatcaatcaccattgtaataattggttgcaaatcaaccggtctcttatgaatcggtatccctttctgctccattcttgtaacatctattaaatcgttcaacaaatacgacatacgccttcctattgtcattaatagttttagatgttgtttactttcaccatttatcgctttctcttcatccattacactttgtgcaatattcatcatcccatgtaacggatttctaagttcgtgcgctgtatttgctaaaaattgatctttcttatgatgctcttcttttaattttccaaccagttcactattctcatcactcgtgcgaaagaatcggataaaccaaaaagtcgaaaatgataccattgctaaaaaaatatcaaatggataaaaatccgcatcaaatatcctcgcaaaccctatgctatacatgaacgcaaactctttaaaactcgcacacaatactccagaagtagcactaatcactgtaaaaagtaaaaagattaaatcatactttccactttccaccactcgtaaaacaataattgctgttaaaatgaatggaataataattgtaaaaaataatataaatccaaaatcttgcactagtctaggtgaagaaaacaatactacgaaaacataaattccacataatacgatggtaaataaaataaatttattgtccccataacctcgtaaaaaccttttcatatacagtaaaataaataaagcgaaacctacaaacgatgtatatataattttcatatatgttgaaaattcaaattcatacaaagagaacaaaaaacgttcatccgtaattaaaaatataatacctgcaaatatactaccaagtgaaaaatatagaatctcaacatttttcggcttcatcacaaaaatgataaatgcatatataccatgtaaaaacactattgtcgttgcaataatttgcatcataagattgttaaagctatcctgtacaatagcattttcactgccaaaacgcactccacctgtaatcccgccatgtttcgattcttgtgtcgttttcgtaacaggaataagaagattaattaccccttgttcattcgcttttacctttatgacagttggtgtaagtgaagttttatgtacatcattcggtttaaaaatacttcctctttcctgtacaagttctccatttacatacaaatcgaactgattatgaacacgctgtatttttaagccgtaattttcattcgaattcttcactttgatagatagcgcatatgtgccatattctttttgatgagtacgatcaactctttctttccagttccccggaacattaatatattcataatctttattattttccttcatttgatccggggtaagtaaaacattcggataaaatttccattcaccatttaacgtaactaaatttttttcgccaaatgttatatctgataaatttactatcccttcttcagcatgtggttgatttatataaagagattgtttaaaccaaatggaacgaaaaccgacaatacaaaggataaataagaatactactatcaatatttttcttttagacatacttattccctctttataaaattacggaatcttttcaaatctttaccataacatatcacactttctttatcgagtgaataataactatattctaaaaatatttccatcactcgtactttaacgttttttcactttaaaataaagaaacattccaatgaaaaataatagaacgattactattccaatcatccacttttctactacaaatggattcacttgagccacaactgcttccttttcttccacttcaaaaggaacccgttcccctcgaactatcaatctatgtgtatttactccataaggtgtgcatgtaactaacgtaacgtaatctttatttttcacaactaataaatcatttgtttcatttggtaatacaacttttatttgatccaccttataagcaagcactttatttaatgaatgtatgtaaaaagtatctcccttcttcaccttatccaagtccgtaaataataaagcagaaggcaaaccacgatgccccgttaaaacagcatgcgtactttctccccctactggcaaagaagaagcattaatatgtcctactcctcggctcaaaacattttcagatgtgccagcataaattggaagctttacatcaattgtaggaatttcaatataccccatactctcacctacatttaatacatctgcatatgaacgtccactctcgtcgccccctttttcattaaatggatccgaaaatgactgtgacgtcgtctggacatttttattatattcattcgcttctttcttcctacgttcaatttctttttgctgtaactcttttacttttttatcatacgaactaaccgctgaataatgagctcgtgttgctaaccaattactaactgttggatataagaaaatacaaagtcccaataaaaaaatagcaccaaatataatgttacgtttcatcatatcctcctataaagtgaaactttaatcagtgtaggttttgttcaccccactgattgttagccctcaaataacgggctaaaatgccgaaaaagaggaaaggcctccctctcctcttttcattaccgtttaaatcgcttattaattatttgttgctttttttctaaagaaaacaaatgctgctattatcattaatacaagacctactacagtaaataagattgtaccgataccacctgttgaaggtaaaatccatccactcttattattttctacagtaagtgtaactgttttatgatcagcatcaatctttacatgaattggctctcttaattgttgataactacctgttgtaccatcttctttttcataagttggagctttcgtttccacaacttgatactcaccgtaaggtagcttattccatgtaattacaccatttttatcagatgtacctactactttctttccatcgatttctactggatttccttttgtatcttgcagcgcaaattctgcaccttctaatttcttaccatccttcccatcaactttcgttaatgtaataccaccagtcgttggagtaacgataactggttttgttgccttctcacctgttacatcatctttgtttttaaatgtaattgttgccgtattcggaatctctactcctgtttctacgccatctctaatttgtgctttaatttgcaaatgaaactcttttttgttatctaatttagagaaatcttttacagtagccgttactttttgaccgtctacaactacttctacaacacttgcatctactactttaccatcaatttttacaactggttgatcttgaatttctaatcgactatctaatacatctgttacgacataatatttataatccttaatatcttctggaattagtgttttaatatcatagttataatccgtcttcgtattaattggtaaattgtttaaatctccattaatcttcttatcaattgttggttcttcatagtttttcacatcaactttaactacttcaccagaagtaactgtaccatctttattaattacaccagattctttaatgaagaattcatattttttcggatccaacacataaccatctagcgctttcgtttctaaaaagtaatacttcccgtacgataagttaccgacacgaattttaccatttccatctgtctccaaacctttttctaactctgttccatcttctttatataaagagaattgaacaccctttaacgctttattttccacaccaatttttgttaattctactgcaccacgtttcgtttcatttttcggataaattttaacatcatatgttaatactttcccatcttcacttgtcatcgggatatcaactttgtatgtttttgtgtctatatttacatgtggtggtccagaaatttctttcacttcgtaacgacctagtggtaaatcgccaaaaaatgcaatcccatccgcattcgtttcaacttcaattggaactccatttactggtttgatgtcttctttaacaattttcccatcgtttgaaattgttccaaatgattcaacttgtttaatttgatacacaactcctgctaaaggcttcgcatctttaggaatttctactcctttagagctactttcttttaaagctggattattaagcggctcttgttcaaatttatggattgttaacgtgccttttttttcacttttcgattccgcttttattaacatacttggcaatgaagcaaatgctagcaaaaagattaaaaacatacttaaaaattttttcatttctcgttctcctcttctaccaatttaatattctagtaattactatttctcttatggaaaaacaaaaatacaactacaatcattaaaaaagtaccaattaaataaaatacatttgttccagcaccgcctgtgtttggaatttcccactcgctttttttgttttctacttttaacgtttgtgtaggtgtcgctgccgttacctcgacctcaattggatcacggagcaacatatatccattcggcgctttcacttctttaatcgtatattttccaaacggtagtttctctaagctagccttgccattttcatctgtaattaactttccaacttcttttccttcttggttaaaaacttgaaattccgcatgttgcaacttaatattttcatcagctgcatctaccttttcaatttcgatcttacctatagatggcggaataacaactactttattcgaactaattggcgtattatcaaatatgagctctgctatatttggcacgccgccatttgcaatatatttcgctaacacctctactggtgtaccttctgctattttgcttttaatatgcatcgtgtactttaaaccagctaaatacgcatatgaaccatctttcttctctaactcaattgtcactttctttgtttgcttatcaatgttcggtgttacttttacaacttcacctttttcattcataagcttcacatctaaaatatctagaatatcctctaagtcatcttgtaaggtaaccttctctaaatttgctgtatcattaccaaattgatatgctacattccaagtaaactcttcatttctctcttgcaatgtacccttttccacttctttctcattttgagtagaaacggtttttgttactttcggtttttccttcggaggaaccacatacacttcgttagatttcactgacttattatttagtactaactctgctgtatttgggattccaccttttactatataacgtgctaattctgattgatttacaccatcagcaattttagatgtaatttgcaccgtatatacttcacctgttaaatacacataacttccttcttgcttcggtacttcaatcattacctgtttcttagcagtatcaattttgggttttatatttacgacttcaccttttttattgatgaccttcacatctaatatgtctaaaacatcttctaaatcatcttgtaatacgatagaatcgtatccacttggtgaacttccaaattcatactgcacattccaaacaaacttctcttttacattggataatgtagccttttccacgttcttttcatcatcatccgatacagtcttgcgtaatttcggttcttcaattggtggcttcacaatgactttattagaaacaactggattgttatctataatgagctttgccgtattcggaacgccacctttatctaggtaccctttgatcacatcgatatttgtaccaatctttatcttcgctttaatcgttaatcgatattgtccaccagctaaatacgcgtacgaatcattttgctttggcaacttatacgttacaattgacttttctttatctataactggcgctatatttacaacttcgcctttttcatttactaatttcgtctctaaaacttctaaaatatcttccaaatcatcttgtataacgatttcttgttttgactccatatcaaatccaaagttgtaattgacatcatatacaaattcttcatgcaatgaatttaacaatgcctcatcgaccagtttttgatctgaatcagaaacttttttcgttaccgccgtattacacttagtagcattttcattcggaagtgccttgacggcttgaatatcaaacttttgatcaaagaacataaaatatccatccgcaacattaaattctttcgattgcggtgttttttccttcaccttataagtgactttatacgttccttctggctgtccgtctaaatcccaaatgatctgattcccttgtataacaggctttgtattaacaccatttggaccagacccttgcacacctgttacgagcaaatcattattaatatttaaaatcaacttatctttttctttttttgtcacttttgtaacggtttcaattaaattttttgtaaactcttcaatatcatttgccagtacaaaccattccggttttgttgccatcttttttaactcttgccttgcatatggacctacttctttatcgtacttagtataatattggtcagatgctgctagtatacttttatcttcccaaaaagctgtaacaagtttatatcccgcgttttttatattttgagcctctgtagttacttccttcaaagcacctacataatcttgcccatattcattcgacctataacctgtgccctgatccgttagttgatttgttaatttgtaaatatagccatcctttcgaatgttagcaacaccatctgtaacaagcagaaaaactgtttctcggtctggatcattttgtcccttcgctttctcatactcagctaacgcaaactgaagaccactggcagttggtgtaccgctatctggagttattttattgatgccattctttgctgaggtaaagttattagttaatcctgcttgcaaggttgttttaatcccattacctctactttcaagtacacgaccgtcactagctttatatcccttataatcttgataactcgttaccataatccgatccgtcgcaggatttagttcatctacgatattgctcaatgcttttttcacatttggcattgtgcctttgaaacttccacttgcatcttgcacaataacaaaatcaactttcttttgttttggtgctggccacttaaaaattagctccccttcatgctcccttaaacacatattccctgtcgatttagttgttaccttatgctgcaccgcttccaccgtattagcagcaaccgctattatccctgggctaatcacttgaaatacgagtagaagcaacataaataatgtgacgttcttcttcatcgttccatcctctcacttaacataaatttatctcgcctcatttccccctttttcgctaaattacttttacgctcaaagtataaattgggacactgaacaaaaactgaacaaaaaatcaaaaaatagaaatatttaaataatttatcgtatataacaattaataagaatcatttataatagtaattacaaataattaccatgtaatatttatggttatttatggaggaatgaaaaatgtcctattttgtctaaatatttattggtgatatgacttgagttaaatcattaaacaagattgtaagaaagaggtaatgaactatgagggcaattattgttgatgatgaaccattaatactccaaagacttgaaaagatgttaaaagaacttcaaatttttaaagatatcgtttgctttgatgattgtgaatctcttagtttttatagtaaagatcatacaattgatgtcgcatttcttgatattgagatacctgaaaaaaatggcgttatgttagcccgcgaactacaatcaaaacataaaaatataaaaatagttttcattacaggacacgaccgttatgcggttgaagcatttgaaatttatgcattggattacattatgaaacctattacgagggaaagattgcataacactattcaacgtcttatgcaaagcatgacgattgaaacaactaattcctctacaatagaaacttcgatactcaattgccttggtgagttatattatgtagatcatgaaaaagacaaaaaaatccccctagaaaaatggcgcacaaaaaaagcgaaagaactatttttatttttagttcataatcgaaataaagttattaatagagatactttaattgaattactctggtcaaatactgatttagaacaagcaagagtaaatctacattcagccatatatcaaattcgaagaaccatccatgcttacgaaatgaatgtaaacattactcgagtgaatgacggatataaactcgatttacaaaacattttgattgatgttgatctattcgaacaagcagcagccgctcttccaaaagaaatatgtagcgatacattagataaatacattgcatgcctctctttatatactggagattaccttattgatatggactattggtggagcgaaggagaaagaacaagattacaaaacttatattttcaacacgccttttcccttattcgtttttatatagaaggcgcgagttacactgaagcaattgatatttgcatgcgtatgcaatctatgaatccatttgaagaaaatacgtatcaccatttaatttccttatacgctaaaacagggaataaaacagctaaacaaaatcaagaaaaaatgctacacaaattattaagcgacagcgaacttactatgatataaagaatctctcaatatagattcttcatttttgccattctcagctatcctatgctacatttattccggcatataaatattgaataataaggcggagataaaatgaatatacctaaaatcggaatgattggacttggaagtattgcgcaaaaggcctatcttccaacacttacaaaagaaactgattggaattttgtaggggcgtttacacctaatgcagagaaaagaaaacaagtttgccagcaataccgaattcaagactttcattctattgaaatgttagcttcggaatgcgatgcaatcttcgttcatagttcaactgcatcgcattatgaaatcgtttctgaacttctaaaaaaagggatcgacgtttatgttgataaaccgctagcagctacagtggaacaagctgagcaactagtcgagttgagcgagaagtataaccgaaaattaatggtcggatttaatcgcagattcgttcctatgtatgtcgctgccaaagaacaggctaatgatatttcatggattcgaattgaaaagcatcgtacaaataaagtcgggccatatacgtacgacttcactatgttagatgattatttacacattgtagataccgctcgctggttagctaatgatgaccttaacgccgttcacaatatgatgcaaatcaatgaaaagaatgaacttctttacggacatcatacatatacaactccaagtggactgttactttctactgcaatgcatcgccatgccggtactaatttagaacaaattgaacttgtaacgccagggaaaatcattcgcgtaaaaaatatgaatacatttgaaattgaacaggaaaactcagtttcacaaagtggttccccatcatgggatacgacgttaaaacaacgtggttttgaagatgctgttcatcattttattgagtgtgtacaaggcgatacaaagcccgttgtagatggattagaaggattaaaaacacagcaaatgctacaatctttactagatgatgtaaacaaaaattaaaacagatacatttttcagaatttactttcattcccattccctctttatttctctcgtaaatttctatagaatatgttgataggaattataaatttcataatgaatcgtggaaaggatgggattaacacatgtggaacgagtttaaaaaattcgctttcaaagggaatgtcgttgatttagctgtcggggttgtaatcggtgctgcattcggtaaaatcgttagttctttagtaaaagatatcatcacaccattacttggtatggtattaggtggcgttgactttacagatttacactttggatacggtaaatctgctgttatgtatggtaacttcatccaaacaatttttgacttcttaattatcgcagcttctatctttatgtttgttaaagttttcaacaaactaacatctaaaaaagaagaagaagaaaaagaggaagaaattccagaaccaacaaaagaagaagttcttcttggcgaaattcgcgacttactaaaacagcaaaactcttctaaagatagagcataattgaacggataaaaaggcatgtccctcgggacatgccttttctatatgctataacgtttccgaattcatatgaataaataaaataataccagcaaccataagtaccataatgctacctgcaaatagtgtaataccaataaacattaaacttgtgctcatatctactgatacactttcaataaaaatagaaattacatacgtgataagggcaattcctgcaagaatacttcctggaacaaatcgctttaaaccattttgttttaacgtcatatatgcaaaaatagcagtcatacaaagcgtaattatccaaagaacgatcatctcttttcccccctcacaagccttttctttctattatacatgacattgccctataatagttaaatttgcacttatgtgacatataacaaggaatagccccatctatagcgaaggcattataacatacacttatacaataaggaggctttcatttggactatactactacatgtaaattagagctatccgaacgattcgattatgttacgattgacttagacaaacagtttttttacatagaagttgtaaatttacaaagtaatataactgtactaaaaatatcaattaacttgcaaaaagacgaaacgatggtagagggaaatataattcattatgatactttgcacgtagatgcattattacaaggattgaaatatgttgctcgaacatgtattgatcgcaatttaaaaaaccaaaaggaactgttcgcatttttagaagaaaattagccccactaaaaatggttattttttctttttattgatataattgttatagagaaatattctttgtaagggagtgttcataatgatttggatttcactaatcgtattagcttatttcatcattctcgtcccaatacagtacaactacattaaaatgctcaaagaaaaacagaaaaaattgagtgtctcacaaaacgaactatatgataacatgtcttatgaagaatcccaagtacattaccattatcaaagtaacgtatttacaatacctgcttcgcttgtcgcaagtattatttataaagtgaaacatgcagcataatatgtacgctgtaaaattattgtttgaatctgttcattgtagtgagcctgatcctacgaaaattgatgagcattatgaagagaatcacgatacactttttgaagaaagtattattcttgttaaagcaaacaatttagaagatgctcacgaacttggtaaaaaaattgctatgcaatctgaagatacgtacgataatatgtacggtgagcaaataacgtggaagttccgaaaagtgttgcatgtgtttgaattagacgatacaccatttgaaaccggaaaagaactgtacgcaagatttttacacgttaagaaagacgaaatggtaaatgcagtcgtacaaaaatactatcctgaatacgaataaaagctcacagcaatcgctgtgagcttttttatacttacttcgttgaatctctaaattggatacggtgaggtaagataacagtgtgatcttccactttttctttgttcatatactttgttaatagacgcattgctactgcaccgatatcatacatcggttgaacaactgttgaaagctgcggacgaaccattaatgcaagacgtgtgttatcgaaaccaagtacttctacgtcagttggtacgtttaatccagcgtcttgtgctgcatggattacacctagtgccatttcatcagaagatacgaagattgctgttggcttttcatcattgctccaaagcttttcgaatgcttcgatacctgagtcatatgtgtaatctccatcgattacaagattttcatcatatgaaataccagcttcttctaaagcttttttataaccttgtaacttcttcgcacttcccgctttatcaatgaaaggaccagagacgaaaccgatacgtttatgtccttgctcgataaagtgcttcattgcatcataagctgcttgtgtataatcaatatttactgatggcgtttcattttgctcatcaaatgacgctgctaatacaattggtactggagattttttaaattcttcaatgtgaatgtctgtaatatcttcacccatgaaaacaattccgtccacttgttttccaagcatcgtatttaataaatggaactctttctctttgttttgatcagagttacttaaaatgatgttatatttgtacattgttgcgatatcttcaattccacgtgcaagttctgcataaaacgtatttgagatatcaggaataataacacctactgtagttgtcttcttacttgctagtccacgtgctaccgcattcgggcggtatcctaaacgatcaattgcttctaatactttctttcttgttgtaggctttacatttgggttaccgttcacaacacgagatacggtagccattgaaacgtttgcttcgcgcgctacatcatagattgttacgttcatctcatcgcacactccttctatttttgttatctatttttatgtatcggttacttgaatgaaaaaaagacatcaactctatttgcagatgccaccaatcgtcccgagttcttccttttactaatgatacgataaaaacgcaggctcatacaatattttcccgcaaaagtttcgaaaaaattcgcttcttttctcgtattttcgtattttttatgaaaaaagggcattttttgtaaaaaaatagatgtttcctaagtagaaatcttattttaagcagtacgatagtaaatgaaatttatatcggcgatttttcgaatatatcgactgtaactcgaaatatatcagcgattttccaaatatatcgaccgcaactctaattatatcagcgattttttaaatatatcaacttaccaacaaaaatcgacaatgacagtcgctatacaataagagaaagctgttccaaaatccctttttggaacagctcattaaaagtttttataatttacttccaaatgattttaattcattcataaaatcattgaactgcggtatattcatttgctgcgccgcatctgataaagctacagctggatctggatgtacttcagccataattgcatctgcaccaattgccatcgctgcttttgcagttggtaagagaaggtcacgtcgccctgtagaatgcgttacatcgacaacgacaggtaaatgtgtttctttctttaaaatcggcacagcggaaatatcaagcgtattacgcgtcgctctttcatacgtgcgaatacctcgttcacataaaataatgttcccatttccctttgccataatatattctgccgcattaatgaattcttcaatcgttgctgatagaccacgttttaataatactggtttatttacagcaccagctgcccttagcaaatcaaagttttgcatattgcgagcaccaatttgaataacatcaacgtaatctaatgacatctcaatatcattcggatttaaaatttcactaataacagccaaatcatattcatctgctacctggcgcaaaatttgtaatccctctaacccaagaccttgaaaatcatacggtgaagtacgtggtttgaacgcaccaccacgcattaatttcagaccttgctctttcattgcttcagcaacttgacgtacttgttcataactttccactgcacacggtcccataataaaatgctgatttccgtcaccaattttttcacctttaatttcaacaatcgtatcttctgtttttttcttacgagaaacaagtaatgctttacgatgatcatcttcttgtaattctaaaccagcttgaaaaatttgtttgaaaatatgttgtaaagtcgaagtttcaaatggaccattattattctctgcaattaaatccagcatatttctttcacgtacaggatcaaaacgtttcacaccttgtacttcttttaaattaccaacttcttgtacgagacgacctctttcgtttagtaactctaatatttgtaaattaagttgatcaatttcagaacgtaaacgacctaattgttgtgatgccataagaaagccacctctttcaaattcctatatgttacttttttaagataacttattatagctgatacatatacgattgtcacacgatatacagcaatgaattaccatcaaaaaacgttgtatattttcatttaaaataaaaaaagacagtttacatactgtcttttttacaagaaggaaacaaacggtttatcactgtttttctcttttataatcacagcctcgattttactttcggacttgatctgtaattgtactttcgcatctttaggcaatttgtctaacataccttgcgcagccaattgggtaagagccattaattctgttttaccgttatatttaataacaatattcatatttaatgtatccatttgatctttcttataagaaactttagcgttgactggaataaaatctccattagaaaaaccttttatttccttagcaaagttatttatttttgtattatcttctccatgtgcttgtgtaaattcatcagaaggatatgaatacgacttttcatcaattgtactccaatttccaaggttcgtatcattcttttgaacagtagcactagcaatatacgtaccattttttaaagaactagtactttcttgcttaaagatagcaaacgtaattggagatttgttatacttatcatttttgttaatagcttcaataagttgtttagcaacttcagaccctttagacatagcttcttcattcgatacacttgaagacatagctaagccaatcataacaccagataaacttagttcatttgaattctgttttccgaaatagtcttgttctataatattcgtcaaaactggcgcttctactttcgcaactagttcatcaattagtttctctggaatatactggtttaattgcagtacgtgactctctgtatcaaattgctgcgttgcaatatttattaaaccattttcatactctgctaaatctaatttagaatttgtttttatattagctgtattaataaccttttgttcttttaaaggaataacagttctataataatctttagaaacagcagttctcggaatcatacttttttcttttgtatctttttgtataacttcatccttcttactaatcgtattactattgttactacaagctcccagtaataaacttacgactgcgaaggataatgccattttcttcattacttaaaacctactttcaacaatctagttatttagtttgaactattaatagtgtaccactaaatatatttcaacaaaaacaaaaaaaagaagcaagcacctttagcttgcttctttttactttatattctcttctaaagcatcttttttaatattccaatgagatgtattccatactaccatcccatcttttatgtatagcacttgcggtgattcatgtctaatactgtattgttctgcaacacgatttgacacatctctcgcatcttgtacgtataagtaatacgctggcacttctctttcttcgctgcaatacgcttgaaattctgtgtatgcaccgtgactaatcgggcatgtcgtactatgtttaaaaagaacatacggctcgttcttttctactaagacttcaagctcttcaattgtttcaagttttgtcatattcatcacgattcacctctcatacgaaatctagagcgcttctctttcttttcagcttttttctcaattctttctaatttacgctcttctttttcaaccttcttctcttgtctcgacgcacggtaatgattgtatacttcaatcgccgcactgctccactgtacaacttgcgctactttatcagcgttattttcaatttcgtccgttacagagtccgatacattacgaagcttcgtatttaaagattggattgtcgttccaatcccatctacacccgctaccactttatttaatgactgtgacttctgttgaatatcatcagctaacgcattcgttttatgtaataattgctctgtctctacgctaattccttgcatttgcttttctaaaccttctaacgtgcttgcaacgttttccaacgtcttctgaaccgataacaacgttctgcatacatacactactaatactgcgaaagcaaccgcgataatagccgcacttacatataaaagaacttgcatttcatcacttcctttatctttttcatactttcccctattatacaatcattttccgtttcattctaatccctatctcatcattagaattttcatacttattcgttaactgtaacataaatcattcaacaaattccactaagtaggttacaataggagaggatacataattagtagggaggctttacatatgaaagatccacgtattgaaaagttagcatacaatttaattaactactctatccgcttacaaaaaggtgaaaaagtattaattgaaaactttggcttacaaaaagaacttgtaactgcacttgtaaaagaagcatatgcagctggtggtttcccattcgtctctttaaaagatcatcaagtagatcgctctttattaatgggtgctactgaagaacatttcgaacaaatcgctgcatatgaagcaagcgtaatgaaagacatggacgcttatatcggccttcgctctggtgataatattaatgaacaagctgacgttccaagtgagcgtatgaaagttcatggccaaacagttggtaaaaaagttcatagagacattcgcgttccaaaaacacgctgggttgttcttcgctacccaaatgcttctatggcacagcttgctaaaatgagtacagaagctttcgaagacttctacttcgaagtatgtaacttagactacggtaaaatggataaggcaatggatagccttgttacattaatgaataaaacagataaagttcgtttaactggtcctggaactgacttaacattctctattaaagacattccagcaattaaatgctcaggtcatttaaacattccagacggtgaagtatactctgcaccagttcgtgattctgttaacggtacagtttcttacaacacaccatctccttacaacggttatacatttgaaaatgtacaacttaagtttgagaacggtcaaatcgttgaagcaactgcaaacgatacagagcgcattaacaaaatcttcgatacagacgaaggcgcacgctacgttggtgagttcgcaattggcgtaaacccatacatcttacatccaatgggagacatcctattcgatgaaaaaatcgatggcagcttccacttcactcctggacaagcttacgacgatgcatggaacggcaacaactcgaacatccactgggatttagtatgcatccaacgccctgaatacggcggcggcgaaatttacttcgacgacgtactaatccgtaaagacggacgcttcgttgtacctgaactagaagctttaaacccagagaacttaaaataataataaaaacgctcggaattttcgccgagcgtttttatttctttcctaccatttctattttcacatgtggattttctttctctataagccccaagaattcatccatattttgcggcatcgcaaccatatgtactttatatgcattcgtcgtaatttcaagagactttccgacctgacgtataattctcacatcttttaatacaatatcatcatttaaaataccgtactttaatacgccattttctactttatgttttttaataaatacttcccaaacgagtggtacatttacaatgaagcataaacccatcccaatcaacgctgacatccaatgcgctttattggtgaaaagcatgacaattggatatataaacataaacgctaacgtaagacaaacgaaaatgactactgacttacttctttgaattggaaagttcatacctacaccccctaacccaaattataccactatttccattttgcttcatagaaaaaggccatttctaaatgacctttttcacaatgtacctataaaatttcttatctacctgtagcaccggaaagtttttcggcaactcgtctatactcacactttcaaaaccattcttttcataaaaacgatgtgccgctaaaaattttactgttgttcctaagtaaatatctttcaattttttatcctcagcccatgaaattgctgtttgaagcaacatatgtgatgcgccccattcttttccgcgaaactctttcttcacgaacatttttcttaacgctacttgatgattctcaatatctaataaagctactgttccaactactttaccatcataaattgctatccaaaagtttccgtaatccttttgatagaatgtttctatttcaagtaaatcaggttgctcttctttcgtaattgaaacattatactctttttgctgaatatgaacgataagatctactacttcctcttgaaacgtactttcatacggaataatgcgtatcttctcgttcatcgaatctccttccactctgaagctagtaaactatatacagcgatatcgtgaaaatgatcatatagccattcatcatctcttaaaatgccatctaacttaaatcctaaacgttctggaatagcgcggcttttcacattttcaacaccgcatctaatttccattttatttaattttaaattctcaaatgcatagtgaagtacagccttcacactacgcgtcataatacctttcccgccagcatcttctgcaagataatacccaagactcgtcgctttcttcccccagctcactggatgaatacctaccatcccaacgagctttcctttgtaacgtatgccactttcaaaaccatctccctctgcaaatttctttaaccacatcggaaaaatctcatcataagcatcagcagatttcgtcccatctacccaagggagccattttcgtaaatgattacggttttgatctaataattgatataattcctctttatgatgtttttctagtaattgtagttcgatttcgtcatctactcggagtgtgaacatgttttttagtcccctttttagttttcttattattctaacacttatatttcaaaacgcgtaccaatatatcaacgatttttgaaatatatcgaacacaactccatatatatagacgtttcaacattaatgcataaccacgacaacataaaaaagacgcacagctaagctatgcgtcttttctattacttctctgcaacttgaacttcttttacgtaagctgcttcgaatttttggatgtcacctgcgcccatgaaaattagaacgccgtttttatgtttctttaatacatccgttgttgtatctgtaattagctctgcaccgtcaatacgcttttgcagatcttcgattgttaattcacctttattttcgcgcgctgatccgaaaatatcacataagtatacttgatcagctttgcttaggctttctgcgaactcatctaagaacttttctgtacgtgagaatgtgtgtggctggaatacagcgacaatttcacgctctggatgtttttgacgagcagcttcaatcgttgcattaatctctgtcggatggtgtgcgtagtcatcgatgattacttgctctcccatcggcttttcattaaagcgacgttttacgccttcaaaagttgttaattgatgttttactgcttctacatcaacattttcataatggcaaagcgcgattactgctaacgcatttaatacgctgtgattgccgtatcctgtaattttgaacgtatcatagtacgtgttacgaacgaatacatcgaatatcgtgccatctgttctcttttggatgttgcgtgcttggaaatcattatcttctccaaatccatagaaaataacaggtactttcgcttgaattttttgaagttcttcatcatctccacatgcaataatgccttttttcacttgcaatgccatctcttggaatgcactgaatacatcattgatgtctgcaaaataatctggatgatcaaaatcaatattcgtcataattgcatagtctggattataagacaagaaatgacgacgatactcacaagcttcaaatacaaaatacttactattttctaccccatgccctgttccatctccaataaggtaagatgtcgggtgtgcaccttgcattacatgggctaacaaacctgttgttgatgtttttccgtgtgcaccagttacagcaacacttgtgtattggctcatcaggtcacctaagaaatgatggtaacgatggactgggatgtttaattcttttgctgctacgatttcttcatgcgtatcaggaaatgcatttcctgcaataatcacttgtccttcttctacattattcttatcaaaaggaaggatcgagatactacgcttttccaacgctgtttgtgtaaagaaacgcttttcataatcagacccttgaacagtatgcttcatatcatgaagaatttgcgctaatgaactcattcctgttcctttaattcctacaaaatggtaaactgtcatcttaaagaacctccaacatttcgaactaatacaacggcctatctataagacagtatatgaatcttttcttattttggtaatcatcatacatttttgatgtagtgaagttattttttcccttcacttatcaggataaactcgtacgtacttctttatatgtccataacaagtccattatagcaaaaaagaagccgctatactatgataacagaaaaactgatagggtcaatcacctatcagtttttctctcttttacatctcttctcttttttctaattgaacacgctctaaacgtgggtttggacgatatttacgaccagcttttgcttctggtttcccatttaattctacattatcaccagtaaagccaatattcatttttaataagctacttcctaccccgtatatgtcaacaggtacgttttgagcttcaaattcacgaatacgcttctcatcaaatccaccagttacaacgatgtctacatgctggaatccttcttcatcaagtgctttacgaagtgcgaatacaagcgatgggtttacaccacgtggatcgaatgttccaagtacttctgggtggcgaatgaagtattgatcaatcatcgtgcgggacgtatctacacgtacaccttttaatgttgatccaaattcacgcgctacgcgaagtgcatctgtaatgacatcattgttgtaatcaattaatacaactaattcatcttctgggaatttcttatgatatgcttttgccgcttccacaacatcaccattaaacatttgaattaatgcgtgaggcatcgtccccataccacttttgccccaccattcattcatcgcatgcgtcgcttgtgcgctcatacctccgatgtatgctgcataaccgtcaccagcttgttgtgtataatgatcgtcacgatctcccatgaaaataactggtttttctttatctacgctacgcgcagcttggacaacgttatatacgtttgtcgcaaccgatgtacgacgagctaaaatcccatcaatgacaccttctaaaaatccgaaattttcataaggaccatgaattgttaacactgtttcaaatggactaattttatcgccatcttttaaagaattaatctcaagttcctcaggatttttagcgaatgtttgtagcaatgcaattacttcatccgttccgcaaagaactgcattttccttttggaaaaattgcatcgttacaacacttttcgggcgaaattcttcgatgatttctctagtctttaaaaagtaaacggcagagaaccacccttctccaacacgttcgtcaaatttaaatgttttatttgttagtctatttatttcaccttttaattttaattcaatttctttcatgtcgctttactccctactttactatccaacattttctcttagtatacagcaaaaccgtttactatacattcgtttcctgcatagcggcaaattcgtcctcagaaataaggacatctctcggtttcgttcctctaccttcagaaataattccttgcgattccatctcttcaatgagacgtgccgcgcgattataaccgatgcggaattttcgctgtacagaagatgtggacgctcccccttgttctacaacaaattgacatgcatcaaggaacaattcgtcttccgactcagcttgttctgttttcgctaataaatcctcttgcttaaataaataattcggcttcatttgctttttcacatgatcaactgttttttcaatctcatcatccgatacatatacaccttgtacacgaactggcttagatgtaccgttccctaagaataacatatcaccacggccaagtaatttctccgcgcccccaatatcaataatcgtacgcgaatcaacttgagatgatacagtaaacgcaatacgcgttggaatatttgacttaattaaacctgtaataacatctacagatggacgctgcgttgctactaataaatgaataccacaagcacgtgctttttgcgcaatacgacaaatcgcttcctcaacatcaccaggtgctaccatcattaaatcggctaactcgtcaatgacaataacgatataaggtaatgtctctcctggaatttctcgctcacttacaatcgtattgtagcgagttaaatcacgagcaccagcatgcgcaaacaattcataacggcgttccatttcctcaactgcccattttaatgcagctgtcgctgcttttacatccgtaataacaggtgctacaagatgtggaacagaattgtatggtgcaagctcaaccatcttcggatcgattaacattaacttcacttcatgtggtttcgctttatataaaatactcgttaaaatcgcgttaatacacacacttttacctgaacccgtcgcccccgcaataagtccgtgcggcatttttcgaatatccgttacaattggatcccctgaaatatcaagccccagcgcaacagtaagcggtgattcactctttgtgaatacaggacttcttaaaatttcacgaagaaatactggcttactttctttatttggaacttcaattccaatcgcactcttccctggaatcggtgcttcaatacgaatatctttcgcagctaagcttaacttaatatcatcacttaaatttgtaattttatttactttcacacctgggtctggctgcacctcaaaacgagtgactgccggaccttgcgatacattaataacatgtgctccaacgtgaaaattattaaacgttgtatctaataattctttctgctcctctaaccattcagtattatctaacgctgattgctgtggaatcgacaacagcgctaatggcggaacagtgtatgtcggtggtgtgtgcaatacatttcgcatatcgttctctctttgatttacaacatatgctttctcttgtacttccgtacttgaaattggcttttgtacttgctctaccactacttgctgtattggttgttcttccacttgtggctctgctactacttgctgcactgggtgctcttccacttgtggttctgctactacttgctgcactgggcgttcttccacttgtggctctgctactacttgcttcattgtttgctcttccacttgtggttttgctactacttgctgcactgggtgctcttccatttgtggttctgctgctacttgctgcactgggcgttcttccacttgtggttctgctacctcttgttgcactggcttattctctactcgtacattagcagaaggctgcattgcatttgctctagctgcatgtctttccattaatcgtgttctatcttgtttcaacataacaacattaaatggtacatgacgctttttctcacgttttggttcttctttttgtacaactggttgttcttctgcgactggtgtttcctcggcaactggttgttcttctacgactggcgcttcttctacaactgattgctcttctacgaccggtgcttcttctacaacttgttgctcttctgcgactggcgcttcttctacaactcgttgctcttctgcgactagtgtttcctcggcaactggttgtttttctacgactggcgcttcttctacaactggttgttcttctgcaattaaaacatccgcaaagctttgaacatctttcttcgtttgttcatcagcctcagcaacatgtatgaattcactcttttgttcaattgcttcatcttcttgctgaatttcctcaagtgctacaaatgtctctactacaggcgcgtttatttctgcaattacttcagcttcttctgactcttctgcttccgcaattacttccacttcttctgactcttctacttccgcaattacttcagcttcttctgactcttctgtttctgtaattacttccacttcttctagctcttctgtttccgcaattacttctacttcttctagctcttctgtttctgtaattacttctacttcttctgactcttccgcttccgcaattacttctacttcttctagctcttctgtttctgtaattacttctacttcttctgactcttctgcttccgcaattacttcagcttcttctgactcttctgtttctgtaattacttccacttcttcaggtgcctctgtttccataactacttcttcaaactcttccgtttctgcaattacttctacttttgacacttcttctggtatttccacaatgattgtttcttcaagtttttcttctgctttgacaatcactgattcttctggagcttgcttttctacttcaatagtaggttgttttatttctgtattacgtttaatttcttctgataatattgtatcctcgtgctctactttagaagctactaattcttcttgtagattgttttcgtttaacaccactacatctttttctagcttagcactttccatctgctcagctactgttttatgaagtaattcatccgctgaaacttcctgcggtgtactcatttcttgaatcacttctttttcttctactaaaggcacttggcgttcaatttcataaccgtttttctctagccattgatcaactactgacttttcttcctttttattctctttatattgttgctctccttgctggttagcagctctatgactagaagaagttggtgcttgtccttctgagaaatcagataatgtatatccttttttctctaaccatgcatcaacgactgatttaccctctacagatatttcaaggtcttctctttcctttacttcctcctgcttttcttcctttttctctactgaaggacgattatatccataaattggcgaaatcatttctgttggccgaaatggtctacggttactctcttgcgctggtgtagatgctttctttacgacagactcccgcaccggttcatattgcacttccggctcttcatatgtagaaactaccttttccacatacggtcgtctgcttctttccacctttattcctctttgggcagtcggttcttcatatgttactccttgaacaggttgttcttcgaagcgatttacttcgctttcatcctcttcatcgaacccattatccggtactaaaggaaaacggcatttacctgcattcctacttgccatttgtgcttctcttgcttcagtgtagtggtttacacgaggaattttcggctgactttcaatttgctttggtacttctttattcatcgctgtttgttcttcctctttgttaaacagctttttcatccaatctaacatgcttaccactctttctactaaatagtaacatcctttattgtatcagcattcggcaaaaagtgcaggtaaaattaagcatgtcatatttatccataatattctaatttacgagtgttttcatataaaaaaacgcagtctttcatgtaagactgcgtttaagctttactcttccgatattcatctacactatccgttacactttgcaacaaggaatttacatactgcgagtcagataattttttatcttcttcaggatttgacataaacccaagttctaatagtacaccaggtactttggaccaattaaatccagaaagatcatccctgaatttaattccattcactttcacttgttgattctctctcattttatttacaatcgtttgagagatttgaagactttccgcataaatctctttcgtatacggacttccttctgccggcgtcaatacagcgaatccactttggtttggattttcagaaccatctgcatgaagacgtaaaaataaattagccttatgattatttgcgaatgtcgccctttctttattacttatatcaacgtcttgtgatgttctcgtcattaatacttgtatcccttttgcttcaagcttttcttttaataaaaaagccatttctaatacaagtacagcctctctctttttcgtcacaacacctgttgtaccgtctgtcactttatatttttgcgttgttgcccctggtccaatcggctctaaatttaaattcgctttttgttgatgccctggatcaataacgacgagaaacttctcttgtttttcattactctctactttttgttcattattttgcactggttgctcagtcggctgcactggcgtagtttcttctttcttttcatcagatgatacttcctcttgcttatgttctacttgctcattcgtttgaattgcttgcgattcttcgttcttttcttgttgcttttctaccggtgcgtcttctttggtatctttgtttttctcttgtatagaagatgtagtttcttttttcggctgcccttgtgaacaaccggccatatatattccaatgaatgcaatcatgctcattatttttatatacttcatacttctctcccatcactttgcaccggattcaaagtttttcttataattgccctataatctcatctatatttccaatataaactggttgccatttttctgtaccacgttctgcagtataaagcggataagcggcatcatctatatttacgaaaactggatcgcccatatccgtttcatatccaattgtaatccattcttctttccattttccgtgttcttcacttattaatgaatttttatgtttatcgtatcggtaaccgatttgtcctttttctaattcactttcactaaacaaatatatttcataagtacctagctcaacatcttgctgttttgaagtttcaattcgttttagaagttctgcgatttttggttgctgtttcatacttctatccccttctacttttctaaattttaactagattgtttataaaatacaatatagattttaagaaaaaaagtgacatccttatcatattaacgattttttaaatatatctatcacaactctcaatatatcaacgatttaacacgaaatttcgatttaccgacaaagaatgacaaaaaaagagaggctgtccaaaaggacaacctctcttttcttatatcaattaaaatttaaactcttgtccaacttcaaagctatcttctaatacaagaatacctttttcttgtggagcatctggaagctctaattcacgtgcagagcagatcattccagaagaaggaacaccgcgaagctcagctggcttgattaacataccgcttggcattacagcgccgatttttgcaacgacaactttttgtcctgcatcaacgtttggtgcaccacatacgatttgtaatgtttctgtaccgatttctactttacagatgtttaacttatcagcatttggatgtttttctttttcagctacatagcctacaacaaatttcggagaaagatctgcttctactgtttcttcaaagccattcttcgctaaaatttcgttgattttctctacaagctctttcgttaatgtaaggttgcctgtttcttttacttctaagtaagaagatgcattaaagatgttgaatcctgctgtctcgttgctttcacgatcgtatacgcgtgcaacatctcctttgcgatcaaaagtacggttctctaaagtaatatcttgtaaggcaacaattaaagtgtcaccaattccttcaaggttgtaaaaaacgttcacttcgttcatcctttctcttttccatctgtcttcttccgatttttcgctaaaataaagattggttcaaattctccatcttcatatacgaatgaaagtgatgtaatcggaacatgcccttcggcaaaaaatttcattgtcatttgtgcaataatatcataaccgatttcgttgacgatatcagcaataattaatacatcttggtgaggaacagcaacaaccatgtcaccagaaatcttttcacgcatcgattgtagtaacgattcgtttaaaatacgagtcgcgtcatacccatcatttgtgtttaaaaagtagaatgtattacccgctactgtgtcttgtttaaattcataacctaatgagcgtgcgttgaataatgccatttcacgcacttgctgttctgtaagttctaatttttgtaatagacgctcgtcaattagtcgatacgttttattcgaatctaacgcatagtaaatacgtgtttccgccgtatgatccgtcataataaacggatttccttcttctgcttgtttcgggaaagaagtagagcgaataacaggtaaaattttcgctccgctattttcttctttatgcatcgcaattagcgcttcttgtacgtaataagcaacttcttcaattgccttttctttgttcacttcccattttgccacaactcctggaagcgatacgttaataccttttttggagtctttttgttcaatacgtaaaacttctttctcactatcatactgaaagtcccattctgggcgagataatttctttattagctcatctttcatctttttacttgtcatcttcatctctttttcctcccttccaaaaaaataacctcccccgcgaaggtagaggttgttttacaattcaattggcaaattgccttattttaaaccttcaatgaactcttcgatttgttcttgtgttttacgatctttgtttacatagcgaccagtttcttcacctttattgtacgctacaaagctcggaatgccaaatacgtctaattttacgcatagatcaataaactcatcgcgatctacatagtaaaatgagaaatcactatatttctcttctacttctggcataaatgggtctacaaagcggcagtctgggcaccattctgctgagaacataaagactacattctcttcattttttaactgttggaattgctccatgctttctaatgacttcatctatatttcctcctctaacgggtacatttttcatgttataatctttcttttatactaccatacatcgcgcacggtgcaaggtttatgcttgctttttgtcatacttatattgcccaactaacaacttaacaacgtgtacaaataattccgtacggtcgacataatcatctgtaaaaataccgatcgcaccttcgtgactacgaatatcttttcgctgcacaaactcttccatcacttcgcttaattccttaccatcttcaagaggtgctaaaaaatcgtctggtaacgtaatacgcgctcctccggccacaaatactttcccatcacttgttgctagcgcgccccagttacacataaataaaccgtgctccgttttcattacgccgccttctagcccaatcccaattggagcttctccgtcctctagcgctcgcttcgctctattgatcgctccttgcatcgtctcttcatctgagaaaggctgagctgatactcctgacggaacagaaagagatgtaatttcagcatctttccaaaccttctccacagcgccaaccttcgttttattcttcgatccaactactactttcatttcgttcacctctataaaaattcatcattctattctaatatccgcttcggcacaaattaagtaccaaccactaccacacaccatcagggaattccttctccccataaaagaaggtcgctttctaaaatattactggtcctaaacacaaaaacaggcttcttctttcttcctacccgcggtcttaatacatcattcgagcacccattaggcactaaccgccaccactcatcgctgggtcatctattcaacctaaaaaaagaagggtttttcgcccttcttctctacgcgttattcttaattgtctctaacgtcgttttatctgttgttcttacaagcttcgtaattaattctttcgccgctgcataatcatcaacatgtaaaattgaagcatgtgtatgaacgtagcgtgcacaaacaccaattactgctgatgggataccagagttacttgtatgtacacggcccgcatctgtaccaccttgtgaaataaagtattggtacggaatgttgtttgtttctgctgtatctaaaataaattcgcgtattcctctatgtgttaccatcgtgcgatcgtagatacgaagaagagcaccttttcctaattgaccgaactgtgttttgtcaccagatgcatcgtttgctggacttgcatcaagcgcatagaaaatgtctggttgaatcatatttgcagctgtttgcgctccgcggaggcctacttcttcttgtacagtagcaccagaatataatgtatttggtaatgtttcatcttttaattcttttaacaattcgattgcaagaccacatccgtaacggttgtcccaagctttcgccataattttcttttcgtttgccatcggcgtgaatgggcaaatcggcacgatttgttgtcctggttttacaccaatttcaatcgcgtcttcataactatctgcacctatatcaattaacatattttttatatccatcggttttgcacgttgcgcgtcacttaataaatgaggaggaatagaaccaacaaccccaataacaggaccattcttcgtcataacttgtacacgctgtgctaataaaacttgactccaccatccgcctaacgtttgaaaacgaagcattccgtttttcgtaatttgcgtaatcatgaaacctacttcatccatatgacctgctacaagaacacgcggaccagtttcgtccccttttttcagaccaaatacgctacctaaaccgtcttgtacaatttcatccgcatatttgcttaattcttgtttcataaaacggcgtacatcatgttcaaaacctgatgcaccttgtaattctgttaacgtacgaaataattgtaatgtctctttattcacgaagtccccttctttcaaaccttagtagaatacctcttttattgtaacgaaattttcgaaatgtttctagtttcttcttttttagctgtatttgctttataattattatcggtacactatttttattttatagaattgaggtgaatatatgagctggaaaggtttagtagcaggtcttggcgttgggttcgcagctggttatctcgttgcaaacaaagtacaagaacaatcccatatttcttcagaaaaagcattgaaaatggtgaaacaagcattaagtcataaaggtgaaattactggctcttgggtacatatggttccagagacatttgaaaaatatgatgtcgcatatgaagtttatcgcggcggtcttacaacaatgttaaatgatatacaagaacgatttgaatttttagttgatgctaaaacaggtactgttttagaggttatagcagcataaaaaggagggttcccattaggtgaacctcttatttttttgaaattgcgggtattgattaaaattatatcagcgattttccgaatatatcggcgcaactcaatttatatcagcgatttcccaattatatcggcgcaactcaatttatatcagcgtttgtttaaatatatcgacttaccgacaaaacccgacaataaaaaagaggctgctccaataaatatgatggaacaacctcctatttttatgcttctatactcgttttccgttctactttttctacgatatgcccttcctcattccacttcacagcgcgataatatgcgtcatggtaaaacgtaaaccatgcctctttttcagcaccatacttcatccacttttgtttattttcaatcgaggtcatcggataatcgtcgtatgccattacccataatacattttgatgtgcgtgcgtcggtaataggtctgctaaatgaagcatcgtttccccatggctttctaaagcaataactgcatgtccatcactatgaccacctgtatgcaccatttttatttcatctgtaatttctatttcttgctggaacgtaacaacttgatctacaatcggctcccaattttccttccaatatgtattacgggatctaatatttgggttcctcatttcattccactctgtttcacttacgtaaactttcgcgttcggaaacgctggtacaaggtgatcaccttcccattttgttaaaccagatgcatgatcaaaatgaaggtgcgtcattaaaacatagtgaatatcttctggctttaatcctagtttttctaatgattcataaaccgatgattcttctgttacaccttgattccgcttcatcttctcattcaatttaccgtttcctattccggaatcaatgagcatatttccgtctttcgtttgcaaaagtaacggatctgttcgtaaataaatatgatttgtatcattatgtttatacttacgtgaccaaagtactttcggcacaacaccaaacatcgctcccccgtctaaatgtgtattcccgccttttaaccacgttacttttatatctccaatttgtaactgttccattacacatccccctttcaattaatcttaacataaaattctgattattttagatgtaaaaaaacctatgcattactgcataggctctgtacgatattttgcttcaactcggtaaatacgatgacctttactagagaatttctcttcgtattcagtcatgatgttaccttcaaagtcgctgttatgaagatctaagcttaagtacgttagtaacataccatactcagccatactcataagagaatattcaaatagaccttggttatctgttttgaaatgaatttctccgccttctactaacacttcttcgtaattacgtaaaaatgttttatacgttaaacgacgcttcgtatgacgtttctttggccatggatctgagaagtttaaataaacgcgatcaatttcacctttcgcaaagaaaactgttaaatcttcagcatctttattaattaactttaagtttggtaattcttcttcaattaatttatcaagtgcatctacaacaacacttgtgaatttttcaattccaatataattaatatgtggattcgcttttgccatatcatacatgaagcggccacgacctgtacctacttcaatgtgaattggttgttcgtttccaaatacttctttccagctaccagcgcgctcctctgggtttccgattacgatatgtgaatattcattaattcgatccattgcatacggtttatgtcttaaacgcatagatgtttccctctctttacatagctattttaaaggaataattccttctttcttttttaatcaatctaccaaacaaaaaaccaagtacgtacgagcactcggtccgtttctttcaagtataagatgtaccattttgataaaaactacatacagcattaaacattccatgacgaaacagctttttctcttacatttgaagagaaaaacaatcgaaaggatgatccgttcatgccaattaatcaacaacatcaattagaagtgctgaaagatattttagtcaaccaccaaagtgattgctgcgggacagtttcagaatgcgagcaattagagcgcctcattcaatcgttactcgcaaacgataatataagtagtgacgctaaaacaatgctaaacgatgtatattcttatagtcaatcgggtaaatcttcctctaatttggacaaccatatttccaataatcaagaacaacttactcagtggattgctggaatggacaatttttcttaagtattattctgaagcaagtagttgctgtaaatattgatgccaatattcagcttctgcttgctgtttttttgttgtatgccattgaatagacaaaatcgtttgtgctatcacataccatctcatacgcctaagcagcgattcatccatttcaatatcataataaccgagccactcactccactcctggcgcggaatgtaccaatataataacataccgaggtctagagctgggtcagcaattacagctccatcccaatcaattaaaaacaattcatcttcatccgacaatagccagttgttatggtttacatcacaatggcatacaacgaattcattgtattcaatagcttttaatgaatccattaaatattgaaggccttgctgaattgtttcatcatcccttatatctcctcttaaaacgagttgcagttgttgtaataactcttgtgcgtgaagcggctgcttcccaagtctttgaatcatctgtacaagcgctttagaggagtgtattttctttaaaagtttcgcaacacgttctagtttcatatcctctggctctagcttctgtcccggaagccatttttgagcagaaattacatcaccattcgttacccttcttgtccaaagtaattttggaacaattccttctgctgacaataccgctaaaaagggcgatgtattccgctttaaaaataacttctgttgtccgttttgcgcaatatatgcatcgcccgttactccaccagccggtacaagactccactcttttcctaataattgttccaaccattccatattcattacccgttaacaaatccttatcttttatagttatgaaaagaaaaaccgcaacatttctacacatgttgtggattcatatattttactgtaaatgaaaagaaaaattagcctaagccaaaaatcctctattttattttacaaaacctgtcatagaatgacaacttatcaaaatcgtcacctttgtcaattctacatttattacattctcatcgtcaagtagcgatttgtcacattatcgtcaatatatacgtgctaattggagcgagcctaagttcctttcctctaaatgaagaaattggctctattttcgcttcgttttcgtttactaacacatgccacgttgcttctttcggaagttgcacagttttagcttctaaaccgctattaaataagacgataatctctttccacggcccaaacgattctgcatgctctaggtgatatgcaagtacttctgtagatgtttgtaaaaaagtcatatgtttttttataaggtctgcattttgtaatcggaatgccccatgctctttacgaatcgcaattaaaccttttatatagttaacggtctctatctctttctctttttgatcccaatctaattgattgatctcatcatttgcattataactattttcatttcctttcttcgtacgataaaactcttgccctgcgtgtaagaaaggaatgccttgtgaaagaataaccattgcgctcgctaataggtgacgttttttcaaaatcgtttctgattcttcattactgcgcactagtttatcccacatcgtcatattatcatgacattctacatagttaatgctttgcgccggctctaaaaacagccctgtttctttcatacttaaaagacttcctgctgcaatatactgcaaatgattacagtctacatgcccaccaaatgcaaaaccacgcttatttatatgaaatgtactcccttttatcccatcacgaaattgatcattaaactgcgcgatatgtggcattttcttcgcattatttaacgttgctttttcctcaagaggaagcggtgtttgtaaatcccatccttctcctaataacaaagcatctcgttttatgtttcgcacttctttctctatcatattcattgtatcaacatctaaaattcccattaagtcgaatcggaatccatcgacattgtattcagtaagccaatataaaatagactctacaatgaatttcctcatcattttccgttcagacgctacatcatttccgactcccgtcccattagaaggcataccatcttcaccatgacgaaaataatatcctggaacaagcttctcaaatgatgatagctctctttcataaacatgattatatacaacatctataatcaccctaataccttgttcatgaaatgtttcaattagttgtttgcactcaactatcctgttatacggatcagaggggtttgtagcataaaatcctgttggtgcattgtaatataatggattatatccccaattataggcggacgaaggattcgcctcatctacaccaccgaaacaatataaaggtaataattcaacatgcgtaacgcctaaatcttttatatgagacaaacctgtcaatgtcccatttcgtcctgttgttccttcttccattagccctttatacgtcccttttttactcactccactgttcggatgaatagtagcatcacgaatatgcaattcatacaatatggcatctgtcattgcttgtaatggtggtaattgctctcgtttcgttacagtcgtcttttctaaatcgataacaatgccatactttccatttacagtcactgactttgcgtaaggatccaccgcttcgttccatattaaattaatacaaacaagaaatgtatagcgtgctccgtctaaatcaccttgtaatgtttgaatccaaactccgttttctcccctgtacatttcatgatcggtatattctttatcactcttataaattcttactttcgcaagccttgcagttggggcccatactttaaatgtcgtttcttgtttttgatacacagcacctaaatctgtaccttcgtaataatacttttcatcgaaaatttttgttcgaataacagcacctatttgtaaatcagtttcttcattccgttcatctcgtactgtataatacttccccacatctagcggctcttctataaagcactcatacttcgttgcatctggaagcgcaatagtatgagcaatcggtaaatctttcacattacttccttcttgcaaacgaaatgtccgacttgttccatacgcatgtgggagcaaaattgtaattttattcatttcatctaaataggcatcaaatggacgttttactttcaacataaaaaaatcaccatcattctcaaagttaaaataaagtgaaactttaatgagcgagaaaatttttccatcctcacttattattagccttcaccaattaggcgagataaaatgagctgcaaatgataaggcttttcttatcaacaagactctatacagtaactccattcttctctatagtatattcacctgcataaaaaacgttttcaacattctatttttgtaattttatttcagcaatcgatttatacttcggggtttctttcacgtgggattcgtataaagtaattgtatctgcttgaaatgatatttcaggcacttcttttatactttctaaacgaaacttttcttctcctatccatttacgagcaacggtaatatgcaggtgatacgggcgtatttctagagaaaatccattttcttcacaaatggcatgtacttgcttttgcaactgaaacaaatcgtgattctcacttaccttcgcccaaaaaatacggggctgattttccctaccaaacgttgaaaaaccttgtaacgtgaacgatagttcttttgtttctgcaactgtttgtaatccattttttattccctctaattgttcctccgttgcactccctaaaaatgaaagggtaatatgatagtcttctttatgtacccatgaacgaaattgtaattcctcttgcatgtcctttttatagttatacagcatttcttttatatgattcggtaacgtaattgcgacaaaataatgcagttccatgtacatcttctccttctttctattgttgcttttctttcttatctcattcaggtaaaaagaagccgctctccaaaatagagagcggacattatttatatatccattacttcgctaattcatgaattgcttgcgcgtaaattgctgttgcttttaataagtcttcaatttcgatatactcatctttttgatgtgcaagttcttcttttccagggaatagcgggccaaatgccacaccagcttttaatgaacgagcataagtaccgccgccgattgctaatagttctgctttttcacctgtttgttcttcatacacacgttgtaacgtacggattaatacgtgatctttatcgacgtgatgtgggcgagaattagaatagtcagccacttcaaaaccatgcgtaccaacatattctttcaacttcacaattgtttcttcaaagttagttgtaactgggtaacgtacgtttagccctaagttaccaccgttttctttcgtataagaaatgcgaccgacattcactgttaacggaccgctaatttcatctttataagcaatagtagctttttcaccaaaaatatcaccagtaaatgtttctgttgcaaatgtcgcaaatgcagttgcttttccatcaagtgaaactgtagttaagaagtttgctaataataaacctgcattttctcctttttcaggagtagatccgtgcgctgaaattccttctatttgcaacgtcactgcatttccttctatagtcgatttccctatttttttagcagtttgtaaatactcttcatatgctactgtaagtgcatttacatcttctcctgtaataaccgcttctgcaaaatcaggaaccatatttaaacggcgccctgaatcaaatgaaacaagttcatatgtaccttttttctcttcactaccattttgcacaacttgtatgtcagaaattcctttttctgcattaataattggaaagtctgcatctggtgcaaaaccgattgttggcatttcttcatttttaaagtagtgatctacacatttccaattactttcctcatctgttcctataatcatacgaacacgtttggaaagaggtaagcctaattctttcacaattttcatcgcataatatgctgccatcgttgggcctttatcgtcaattgcaccacgtgcaaaaatctttccatcgcgaatatccgcactatatgcaggagtcgtccagccatctccttctggtacaacatcaacgtgacaaagaatgcctactaactcttctccttgtcccatttcaagatgacctgcatatccttctaaatttttagaagcaaaaccttcagtttctcctttatgtaacatgaaagataaagctttttctacaccttcaccgaatggtgcgccctctttcgccgattcttcttcccatacacttttaatttgtaaaaattgttgtgtatcacgaattaaatcatcttttcgtttcgcaacttcttctgtccaattaattgctgacatcacgcatccatccttcactatattgtttctttcatcataacaaaccgaaatctcttatgccatacacgaaaactaaataccgaacaattgtaatatttcagatatttcttattagtttttcttttattttttcaaaaaaatttgcaggaatttggcgttttacgtagaattttatgtgttagttgactgaccatatatacaatgtcaactaccaatatttttctatatgaatatttgttaaatttctgtaaaatttaagtagattaaagcatgaattttatcatgtagagtacaatggtagtaacgaccttctttcctgaatggggtcaaaaaaactagtagaggagtggttttctcttgaaacctacaactactcgtatgctaacacgcattaaatcaatttatatgtacatcaatgaaaacggaacggtaacgacgaaagaccttgtagatgagttcgggatcacaccgcgaacgatacaacgtgatctaaatgtgttgcagtttaatgaactcgtgtatagcccttgccgcggtaagtggacaacaacaggaaagaaagtgagaatgacctcataatgaaaaataattgtatgtaaataaatacatacccctttctaataattagaaaggggtcttttctgcgcctataaaggtactacttttcagtatctacttgatatgtttttaacatttctacttcttcatctgttagctctcggtattgtccaagttctagttcttcatctaatactaacggacccatctctgttctctttaggtagactacttttttccctaccgcttcaaacatacgcttcacttgatggaatttcccttccgtaatcacaagctcaatttcagaaatatcatcgcttttcaatattgtaagtgcacctggcttcgtttcatagccatcatctaaaataacacctttagcaaactcttttacatcctcttctgttactactcctgcaacgtgtgcataatattttttcggcacatgctttttcggagataataattgatgtgataacttcccatcatttgttatcaataagaaaccttccgtatcgatatcaagtcgtccaactgggaacggatcaaagattgcatcttctaattctaataaatctattactgtttcatgattatcatcttccgtcgctgaaataacaccttgtggtttatgcatcattaagtaaacaaattctttgtattccacaacttcaccgtgaatcataacttcttgctcttctacatttacatgaactttcgcatcttttactggcgttccatcaattttcacaacgccgtctttcaataatttctttacttcttttctacttccatatcccatatttgctaataatttatctaatctcacgtttttcaccttctttatttatcatagaaaagggggacgtaattacgcccctcttgatttcaactttattttaaatctactaccaagtttacgttgaattttatctaatgcttctccgccaaatactctttcaagtactcctgtgcgaattgctaacaatccgtaaacaagaccgccaatacctgcacaaattgcaactgttataagagcaccaatacggccatcaggcgaaatcatgaaggatagaagccattgtgatagttttacagcaacgaccattataagtgttagtactgcaatttggaatgttcttttatatacaacaccgaatgaatagtgtgcgtattttttaatttgttgatttgtgtaccaaacagaagctaagaaaccaactgctgttgctagaattgctcctactgtaccgaaataacgaataaagattacgttacatacaaatttcaaaataacgcccattataagcgcaataatcgcatgcttctgctggttaataccttgcaggattgccgctgttactgtaaataaagcgaataacaacgcaactggtgcataccacattaatacttgtccacctagtggatctgaatcgtaaaacgcagtataaattggatatgccagtgaagaaataccgacaactgctggcaatgttaaaaacatattcgcctggaatgtttgtgtaatttgcaatttcaaatagcggtattgtttttcagtaaatgattttgtaattgctggtacaagcgttaaactaaacgctgttgcaagtgatacaggaatcataattaacttatgcgtccacattgtgaaaataccgagagctcgctctgcgatatcaccttgaccaatcgcctgcataattgagttaaatgtcaatgtatcaatttgttgatataaaggaattgttaacccaattacaacgtaaggaatcgcatatgcaaataactctttaaacaattgaacggtgcttactgttgattctggtacagtttgttcaattagatattgatccaaatattttttacgttttaaccagtaccaaattaacacaccgagtgctccaaccgctgaaacgaacgcagcaaatgtcgctactccaactgctgttgcaactgtaccgccaagtactttaataacgataaaactacctgctaataaaaagacgatacgaataatttgttcaataatttgtgaaacggtagttggtcccatagactggtgaccttggaaataaccacgaattaaactcgctgctggtacaacaataagtgcgaaacttacaagacgaataatcgtcgtaacttctcctacattattgtgtatactttgtttaccaagcatcgcttctgcaaacaatggcgccgtcatgtacagtactaggaacgaaagaactcctgttactatcatcataaccattcccgagcggaacattctccggctcgttttataatcgccaagcgcattatatttggaaacaaattttgaaacagcaagtggcacacctgccgttgcgatacttaaaaagatcgtatatggaatgtatccatatgtatagagcgttccgccttctgttcctactaatgcatgaaacggaaagacgtaaatcatgcctaagaactttactaaaaatgtccctagcgtaacaataagcgttccgcgcagaaatttcgaatcggacatacaaaaatcctcctacatctacataaagtgaaactataattagttggagacttctctcctactccttattagttgaaccattcgagcatttacaggctaacagactccctatttacttctcctaaatcttgaggttttagtcttatcgcctacaaatggcaggatagtgctgaactctaacttttgtattgtaccacaattctctcattaagcagtacttcactctatttttcttttaagggaaaacatgctattcttttaggcaggaaatgtagaaaatgaggtcgatatattatgcattatgatgttattgtcatcggcggcggtccttctgggctaatggctgcaattggtgctgcagaagaaggcgcaaatgtcttacttcttgataaaggaaataaacttgggcgtaaacttgcaatttctggtggcggacgctgtaacgtaacgaaccgtctaccacttgatgaaattgttaaacatataccaggaaacggtcgcttcttatacagcgctttttctatttttaataatgaagatattattacattcttcgaaaatcttggtgttaaattgaaagaagaagaccacggtcgcatgttccctgtgtcaaacaaagcacaatctgttgtagacgcacttttaacacgattaaaagacttaggtgtaaaaattcgtacaaatacgcctgttgaaacgattgaatatgaaaatggtcaaacgaaagcagttatactgcaaacaggtgaagtgttagaaacaaatcacgtcgttatcgctgttggcggaaaatcagttcctcaaactggatctactggagacggatatgcttgggctgaaaaagcgggtcatacaatcacagaattattcccaacagaagtacctatcctttcaaacgagccgtttatacgtgaccgctcattacaaggccttgctttacgtgatataaacttaagtgtattaaacccgaaaggaaaagctatcatttctcacaaaatggacatgctcttcactcatttcggcctatccggacccgctgctcttcgctgtagtcaattcgtcgtgaaagcactgaaaaagtttaaaacgaatacaatacaaatgagtattgatgcattgccagaggaaaatagtgagcaactatttcagcgcatgctgaaacaaatgaaagaagatccgaaaaaaggaattaaaaacgttttaaaaggttatgttcctgaacgttacttcctattcttattagaaaaaaatgaaattgacggtagcgaacaagctggacaagtttctcacgaaaagattcgtgcacttgtgaaagactttaaagagtttactgtgaatgtaaatggtacgcagtcaattgaaaaagcattcgttactggcggcggtgtatccgtgaaagaaattaacccgaaagaaatgtcttctaaatttacgaacggcttatatttctgcggagaagttcttgatattcacggttatactggtggctataatattacatcagcccttgttactggtagaattgccggaacgacagctggagaaaacgcgaaaatgcagtattaaaaaaagaaacagggattcctgtttctttttttataggtacatgaaattatatgagcaattccacaaatatatcagcgattccgcaacttatatcggcgattccccaaatttatcagcgattctgcaacttatatcggcgattttccaaatttatcgacttaccgagaagaaacgacaaatatctgctccatgtaactttccattgcttttttgttgctttatttaccttagtacctttatattttatattgttgaatatttaaaaaagggtaaggggaaaacaaatgagaaaaaaagtcatgatgtctttaatgttaatgacgtttctttctgcggtagaaggaacgattgttagtacagcaatccctcgtataacgagtgatttgtcaggcgtcgaacttgttagttgggtatatgcaatttatatgcttgcaacagctgtttcgactccaatatacggaaagctcgctgatttatttggccgtaaaaaagttttactgatcggagctacaatctttttagtcggttctgcactttgcggagtcgttacatcgatggaacaattaatctttttccgcgcgcttcaaggtatcggtgctggtgctgttatgccaatcacaatgacgattattggagacttatatagcgaagcgaaagaccgcgcgaaagcacaaggttggatgagtgccgtttggggtgtatccggtgttatcggaccgttagtaggtggatttttagttgattccctttcttggcgctatattttcttcctaaacgttccattcggaattatcgcttgcttaatgattgcaatttactacaaagaatctattaaagctgctaagcatcatatcgattatcttggtgcaacagtcttctcattaagtacaatcgctctactatatgcattattaacaggtagcagtaagcaaaactggggagacatgacaattatcggcctattaatctttgccgcgatttcatttattattttcttattcatcgagaaaaaatctccagaaccattaattccgctagcacttttctctaaccgcacattatctacgataaatatattaactcttattgctggcgcaatgattattagtattacaatgtaccttccaatttggagccaaggtgtattagggaaaaatgctacagaagctggacttattttaatgccaatccctgttatgtggacatttggcgctattttctctggtaacttagtaggcaaattaaaaacgaaacaaatcattttacttggagctagcattttatcagtcgctacgttcttattatttacactatcaacaaattcaccatcgttccttatttatgtagcagtcggattattcggcttaggaatggggcttgtgacaccgatttacatggtaacaattcaagcagccgtaccagctcatacacgcggaacagccgttggtttaaacacatttattaatacattcagtcaaacgttaggtgctgcaatctttggaacaatctttaatacgatgattcatgcacgcggcattaaaaaccttgatcttgtatctggtggacacggcgggactacagcaagtgtagccactgaatcacaatccgcattagctgcaagtgtacacgttatttatatgagcactttcgtattagcagtatgtacattaattatcggttggcttttattaaagccagctacacaaacaagtgagcaacaataaaaaggatgaccattttggtcatcctttttttattcttcattctccacaatatgtttcagcatggataatttattatcccaaaaacgttcataatatgagagccactgttgtaattcttctaatggttctggatgcaaacgatatatcttctctcttccgctttttcttccacttactaaattcgcttccgaaagaatatgaaggtgctttacaaccgcagtacgactcatcggaaaatgatccgttattttggaaatcggtaactctttgtcacttaataaccgtattacttctcggcgggttggatcagcaattgcttgaaatacatcatatttcgctgctgacgaggacacttagccttcgacaacctttttcagtttttcatttacaattgctacccaaccaccgctcattctatcgcgaataatagagctcttcgcatttgctttcggaagaatttcatcaggatgtttccagccgccgtgaattaacgtaaattctgttttgttatctcctaagtctttcaaaataaatgaaacaacccagccatctgtatcccatgagaaagacaaatggtttggctcatcaatttctaacactttacatggtgatggcccaaatggtgattgcacatgaaattcatgtcctacctctaatacaaaatcatttggcataaaccatgacgcaatcccttctgcagttgatactacactccataccttttgaatagacgcgttaaaaacgattgtttgtttaatatcatttaatgtattttgttgttccattttcattctcctttactcggcgttacaacataacaccttttggttatacttcgataatataacaccttttagtttcatgtcaacgccaattcttttactgttgagaaattctcaacattttttcaacaggacaaacaccctcttagcattccctcataatatactcacaaaggcaatacaaaataaaaacttctctcaacatgaaactccatcattcatattgaaagaagcgccttacttatatcatgcgtacttcgtctctcctccttccctcaagggacaatacgcgagatatgacaaatcagaaggaatatgcccaccatttgagtaggtagttatttctcttctcctcaacatttcctcaggagcgaaatgactaccgactcacttttttcaaacaaaaataaaaaggggatgaaagctatgttctattgcattaactgttctgatattcatcatgaaaaacatccgaatgataaagtattcaaaaacggtttttatattgatccatttttaggtgatcgttatcaccttggtatgtgtaaagatgcccaaaatcatgaaacaggggagcctcttttaacgacaaagaaattaggcacaccccaatctattatgaacgtattaccgacacatgttgtcccaacataaaacataaaaaagagctgggtgagccagctcttttttatgctttataaacgatcattgctgaaaaacaataaatttggttttcatcgtcgttaatggaaacaccaacttgatacttaatatctacaaagttgctatcatcaatctttttcaaaaacacattcacagcgtcttctaagtctttttcgtgactttcatcaaacactttcacacgaatcatgttaacaccatcctagatcgcagccctccgccgcttgattattgccacggtgcgtatctatgatgcgataaaactttccattctcatatatatatccgtcttctaacacatattttttatcttcagtatagacataaaacttacctatcataaatttactcgtatataattccaaataatttggtctaaatttagctacaactttatttgtaatatcaatttttattgtgcgccccaccttctctccctcctttgcaaagaacggatttaggtatattgtattagcgcttttacattttatgcttaaaaataagtggatatgccctctttctcacctgtactatttttctaaaaaaatcactataaagtgaaactttaatcagcccgaccacccacctaacttctttgctttcgctgaattttgaggtgggggtcttattgcccgttaatgcgggataaataagttcaaaaaaaaacataaaaaagcactttatcttattgactcgaatataaatattatgttatcatataaaatttgacatttttacatacgtatgctatcattaaaagtggttaccacatatggaggtggatgatttgtttcaaattggtgataaaatcgtttatccaatgcacggtgcaggaatcatcgaagcaattgaagagaaagaaatattaggtacttcacgtcaatattgtgtgatacgcatcattagtaaagatatgcaagtaatgcttccgatggatcaattaaaaaaatcaggtattcgttatatcgttgatcgaggtacgttagatgatatacttcttgaatttcaaaacggggagtcagacccatcactctcatggaaacaaagatatacaatgaatatggaaaaaatgaaaaatggcaatttacaagatagcgcagaagtggttcgggatttacttcgccgtaataaagagagaacattaaatgcgagcgaaaaacaaatgctagataatgcacgaaaaatgatgatcagcgaagtcgcgctcgtacaaaatgttactgaacatcaagcaacagaatttcttcaagatacaattaatcactaaatttaaaatagctggccgctatttttttttgtaaaaaaaggacgaagagttttatctcttcgtccttttatattacccacgcccagcttgaaacgatggatataacgtcattccaccatctgcaaatagcgtaattcccgttacgtaactcgcctctgatgaagcaagccaagttgctactgctgcgatttcttcaggttttccaatatagcccataggtatcatactttctacgtcagcacgttttttaggatcagcaaacttttctgcattgattggcgtattaattgcacctggtcctatattatttactcgaataccttttggcgcatattctagcgctaacgtttctgtcatcagtttaatgccacccttacttgctgcatagtgcacaaatagtggccacggaattttctcatgaacactagacatattaatgacagaccctttaatatcatgttctacaaaatatttaatcgcttcacgacttcctaaaaaagcacctgttaaatttgtattaattaccctattccaatcttcaagcggcatttcatgcgacggtaccgcgttttctatccctgcattattaatcataacgtcaagcgtaccaaactctttcacagcagattgaatgagattcacaacatctgattcgacggttacatcaccttttacagcaatcgcttcgccgcctacctttttaatttcttctaacacatcattcgcttctgattctcgtgagcgataattaataaccactttcgctttttccttagcaaacctcactcccatcgctcttccgagaccagttgctgatcctgtaataacgacaactttccctgctaaatcactatacatttccatacctcctttaacttttggctatacctaacataattccggctgcgataataaaaacgataccgacaacgatacccgttaattgacgtttcgttttcttttcacctaatataaggatcccaccaagcgtggaaataataattcccatttgcgatagcgagaaacttgttgcaactccaacacgcggctgtgaaatgaataaaaacatatttccagctgcccaaattaatcctggaataatattgcgaattgcatatttattaaatggatgatgtttaaaggtaagcaaaatcccacctaacaccataccaactgcttgtggcaacaaagccgaccagccatctacgttaaataacctaattactactacgtaaactaaataaccgactgttgaaattaataaaattacgatacctcttttaaagtttgctgcttgctctgcattcttttcttcttcactttgaagcgatgttaaaataacaccgataataatacaaacgagcgctaaaatcccaaggacgaccgatattgtcgtggaccattcatgaaatacgataacgccaaataaagtcgtcgcgactaattgaagtcctgttgaaattggcatcgtcctcgaaacacccattaaatcaatacttttcaattgatttgcctgaccaagcgcccaaaataaacctgacacaactccaactccgataacggtaggtgttaatactggcttcataaaaatataaacaacaattgagaaaataagtgctccaaacgttgttccgagcgtttgactatacgggcccccgcccagttttacgttaaatagcacaatacttccccaaaatatagctggtaaaatcgctaaaaatatatccatcactcattacctttctttactaaatgccatagattatcactctaagtcgttagagtgagcttttattttttctttttcccgttcacaaactttttctgcaataacgtcagaaacattcttttctcgctccactttctttatctttacgtgatctaaatggtcttccaaagtaagcgtaactttatcgttcggcggattatgcgctccttgaaatgtaagaaattgtagcttcacttcgtatctaggaacaaattcatctttcttgccgagacgctttatatctataactgaagcacattcatattgatcttctgtcacttgtctaataactgaatagtacctatttgataatgcactctctaaaagctgttctcttgattctttcgcgaaagaatcgcttggagaagagaaaaaggccacacatagcattgtgataactacacatatttttttcatagttccctccttgttctatagattagtgttctcaaaactgccataaaaaaacgactttccctatgtaggaaagtcgttttaatgaatccaatattaaccaccgctcactggtggaattagtgcaacaacatcaccagattggaccctgtcatcttcatttgcgtattcttcattaatcgcaaccataattggctctgaaactggtacattatattcgttcgcaacaacatcttttaactgtgcaaccgtaatattttctttctctatttgtaattcacttgtccctgcttcttcttgcaagtgcgcaaataacaatactctaatcatacttatagctccttcccaggctctcccgccggatatggtgttttttctaattgatcaccaatccatgagtcaccatcttcccaaaactcctttttccaaatcggaacaatttgttttatgcgttccataatatattcgttcgcttcataagccgctttacggtgtggtgttgaaacagcaacaacaaccgctatatcagaaatttgcaacgtaccgatgcgatgtgtaatcgcaacatatgtacctggccatttctctttcacttccaagccaattttctctagcatcttttctgccatcgtcttataagcaacatactctaagtataatgtacgacgccctttcgtaaactctctaaccgttccaataaatgttgtaacagcaccgcattcacgtcgaattactttcttcgttacttcttcaattgagatttctgtatcaattacttcataatatgtatttatcatttcgcactcctaaccgtttgtaaaaaccagtctatgtacaactcttcttctgttatatgaaatactttatattcttctcgtatatttgccggaacatcataccacgtaataaccgccacaatattttctactttatgtaaaagctcaatgtcttccgcagaacgaagtaacactactttcgagtaattctcttttttatagccttctattaaaattgtatccacttcaaaaaactcatataagcgaataatttcttgcaaggaccatttctttcttagtgaagaaagtgaaagcaatccagcaccttctacactacttacgacagcaccagctttacggtgtctttcgctatctttttgcgctacttctggaaagcctccgtgcccgtgatgtttaattgtagcaactttcatttttcgttcagctaatgcatgcaccactttctcaacaagtgttgttttcccgctattttgatatcctactatttgtaagattgaagtggctttgcccatggccaatcacatccctcagagtgctctaacaataatacggatactttcattccggtctcaaatcctctcgttcctccaggtaacacgataaaagcattcgcatctgcaagtgaagataccgcactcgatttatctaaaccaactggcatcgcttgtaacgccccgtccacaattgttacgttcgctcttacgaaacgagtaaatggatttggctttggaaaatctttttgtaaaatagcatccgctctatatacgtgaggttccttcgcatacaaatacgtttttataattggatgcacaaataattcaaagcctacataacaagcagacggatttcctgataaaccaaagagtaactttccatcaacttcagctactgtcgttacacttccgggcctcatggctatcttattaaagagtacatttgcctgtaacctttcataaatagctggtaagtagtcataatctcctactgatacaccgcctgttgtaattaaaatgtcgacctcatccaccgctgattgaacagctgtaaaacatgcatctaactcatccgcgagttgaccataataacgaactttcccgccagctttcataatttgagctgcgatcatatacgagttactatttctaattttccccggttctaacggctcatgtacttctaataattcacttcctgtcgttacaataccgacaacaggctgttttacaactttcacagtgctatatccaaacgttgctaataaggcggcaacacctggattaattgcaacgcctttctgaacgagaacttgattttgttttatatcttctcctttaaacgacacattgtcaccgttattaaaagggcgttttaacttcatatatgttttcccgttcttctcaaacccttctgtcagctctagcattacgactgcattgcaatcttttggaatagctgctcctgtcataatacgaaccacctgaaaagatcctacttcttctgtaaaaacagaacctgccccgatttctcctattacttcaaattcaactggattctcttgagttgcttctttcgtatcttctgctcgaatggcgaaaccatcgtaaggggaacgatcaaaatgaggaacgtcatgatctgagacaacatcttccccgagaattctcccgtaactttccgtaatagaaatttcttctacttcaccatgctttgcatatttcattacccgttctactgcctcagcaacttgaattggaattcgtttttctaccatcgtttctcacctcatatttgcaattttttttatctcgattaaactttatatattcaatagaaattacttcaaggaggaattccatgtcttcatttacacactttaatgaccaaggacgcgcgaagatggttgatataagtgacaaaaaagcaaccgttcgaacagcaattgcgtgctctagcattgtcgttacgaaagaaatttacgataaaatctctcacaatgaaattgggaaaggtgacgtattagcagttgcgcaaatcgcaggcattatggctgcgaaacgaacttctgatattatcccaatgtgccatcctttactattaaaaggtgttgacgtttctttcgattggaaacaatcagaagaacaatatcgtttactcattgaagtaaaagttaaaacagaaggtagcaccggtgttgaaatggaagctttaacagctgcttcggctaccgctcttactgtgtatgatatgtgtaaagctgtcgataaaggtatgattatcggcgaaacgtacttacttgaaaaaacaggcggaaaaagtggagattatacgagaaattcataatcctttctccgttgaacctaaaggattccctttaggttcaacctatatatcttgcatataaacttttcgctacatttatatcattcgtcccatgaatgaaagctctgccatctgtaaataaaacaaaacgatattcttctaccggaaacgacaataaataaggtgtcgcctttatctctacgcttctttgtaagcgctttttaatttcttccaaattaaaattcttccgcacacctggacgaatttgcactgtatttcgcccacataacacttctgttttcgtttgtgcttcaaatgttaaactcggatatgtacgtaaccttccgcaagataaacaagtatcttttttctgcctattcactttaaatgccatctgttgattattccaaagatcaaatgataacatcgtttcacgaagcgctccgtagtcttctactaatattttcagcgcttccgtagtttgatgcgcaactactaattgtactgccggttgtataataccagctgtgtcacatgttgctccgctcgccggatgctccattaaacagcgaaaacacggtgttttccctggtaaaattgtatacgttactccatagcttccaacgcacccaccatatatccacggaatattatacttttgtgaaatatcattaatgagaagacgcgtttcaaaattatctgtcgcatctaatattaaatctacatcattcactaattcttccatttcttgcaccgttacatctgtcacaaccggagttatttccacctcagaattaatcgctcttaaatgctctgctgccgctaccgccttcggtttatactgctttgcatcttcttctgtatatagttgttgtctttgtaaattactccattctacataatcacgatcagcaatcgttacttttccaacacccgctctaacaatcgcttctgcatttgccgcaccgagagcaccagcaccaataataagcacatgcttctctcttatttttctctgcccttcttctccaacaccagaaaataatatttgtcttgaatatcgctcctgcatgcgatagccccctttcttatcctcctatataagacatttcgatttttggacgattttttgcactttcttctgttcgttcatccgaatacctatcttttctattcatccatacatcttgtataacacttaataactcctcatccgaaagatttcctctaagaagttctcttacatccaaaccctctgtcgcaaataagcacgtataaaactttccatctgccgaaattctcgccctcgtacaagagacacaaaatgactcagaaacagatgtaataaaaccaacttcaacatttgttccaacgtaccgatatcgcttcgcaacttcaccaaagtaatgcgcttcagctggctcaagcggatacaccttatgaatcatctcaatcaattctcgttttgtaacgacttgatcaaaattccacccatttgtactaccaacatccataaactcaataaaccgaagcgtgattccttgctctttaaaatacgcagccatcggtagtacttgatgatcgttcatcccttttttcacaaccatatttacctttacttccaagcccgcctctttagctgctataattcccttaattaccggtttcgtattaatatttcgaccattaatattcttaaatatgtcatcatctatcgcatctaaactaacattcactctatgtaatccagcttcttttaatgccttcgcttgtttcgttaaatgaatagcatttgtcgttaaccctatatctattagcccatcaattttcacaagacgtgcaataagttttgttaaatctttacgaagcagtggctcaccgccagtaagtctaattttccgtacaccgatgctaacaaataattttgccaaacgctcaatttcatcaaaagttagtaaaaactcgtctttcaaaaaagcatattctggcccaaatatttccgctggcatacaatatgtacatctaaaattgcaacgatcaatgacagatatacgtaaatcttgaagtgggcgtccaaaaaaatctttaaccatctcctgcatcgccaccctccctttctgccaaatttctttcttttcattctattataatatattttcgaactgcgatgtttttgctcaagtgaataaagtgaaactttaaataattagaggggattcactccccctggttaacgaggtttacttacaaatacaaagataaaaaaaccttgaaacataaaagcttcaaggttctctgcttattaacttaatctaataatagtcagggtagcccctggcgttgctgtagataatgtagctattgcaactactccaaataactgtaagctaacagcagctccagcaggcaagttagcaattattgttgcactaaatgaaccagtagccactgtcggggcgtttatcgttcccgcaagcggactgccatttacagttatacgagaacttacaagtaatcctgccgttaaattaattgtataagctatataataatttcctgcattcgcaactgtaaatacagtatttccaccactaacggttattcctggaccaatattttgattgttcggtaatggtacattcgtaccacctaataaaacggaaatagcggttcctgatgtattattcgcaaatgcatacgttgcagttgtactaactccagtcaccccggtcgctcctgtggctccagctccggttggacctgtatctccagttggaccttgtgaaccggttgctcctgtagcccccgttggaccttggattccttgcgggccttgaattccttggggacctgtcgctccggttgctcctgtagctcccgttggaccttgaattccttgcgggccttggattccttggggaccttgaattccttggagacctgtcgctccggttgctcctgtagctcccgttggaccttgaattccttgcgggccttgaattccttgggggccttgtgggccggtcgggcctatatcaccttgcgggccttggattccctgtgggccttgtgccccggttgcccctgtcactccttggattccttgaggaccttgtggaccttgaattccttgggggccggttggacctatctctccttgtgggccttgaattccttgtggaccttgtgctcctgttgcccccgttactccttggattccttggggaccttgaataccctgtgggccggttggacctatctctccttgaacaccttggattccttgcgggccctgtaaacccgtcactcctgttgctcccgttgctcctgtcgctccagttgagcctgtcgccccggtatctcctgttactcctgtcgcacctgttactcctgtcgggccaggtggtccacctgatggacctgtcactcctgccggacctgatggccccgtcgggccggtcggtcctgctggtcctcctgacgggccagtcacccctgttggaccagttactcctgttgggccggtagttccttctcccgtcgctccggttgcccccgtatctcctgttgctcccgtcggaccttgtatcccttgaattccttgtggtccttgcactccttgtgcacctgttgctccttgaaccccttgtattccttgcactccttgtgcgcccatcggaccggttggaccaatcgccccttgtataccttgcactccttgggggccctctggacccgttgctcctatttccccttgtatcccttgaattccagttgctccttgtgctccagttgctcccgttatcccttgcacaccttgtattccctgtattccttgtggaccttgtgggcctgttgctcctaccggtccttgaatgccttgtatcccctgaggaccctctggacccgttgctccaactggccctggaacaccttgtattccttgcgggccctgaagtccctctgggccttctggacctgttggtcctatctctccttgtatcccttggattccagttggaccttgtgacccagtcggacctatgtcaccttgcggaccttggattccctgtgggccttgtgctcctgttccccctgtcgctccttggattccttgagaaccttgtgggccttgaattccttgggggccagttggacctatgtcgccttgtgggccttgaatcccttgcggaccttgatctccagtggcccccgttactccttgaattccttggggaccttgaacaccttggggacccgtcggacctatctctccctgcactccttggattccttgcggaccttgtaaacccgtcactccggttgctcccgtttctcctgtcgctcctgtcactccagttgagcctgtcgccccagtatctcctgttactcctgttgccccggttgctcctgtcgggccgggtggtccaccagatggacctgtcactcccgccggacctgatggccccgttggaccggtcggtcctgctggtccaccagatgggccagtcacgcctgttggaccggttactcccgttgggcctgtagtgccttcccctgtcgccccggttgctcccgtatctcctgttgcccccgtcggaccttgaattccttgtattccttgtattccttgcactccttgtgtacctgttgggccttgaattccttgtattccttgcactccttgtgaacccatcggacctgttggaccaatccccccttgagcaccttgcactccttgtggaccctctggacccgttgctcctatttccccttgtatcccttgaattccagttgctccttgtactcctgttgctcccgttatcccttgcacaccttgtattccctgaatcccttgtggaccttgtgggcctgttgctcctaccggtccttgaataccttgtatcccctgaggaccctctggacccgtcgctccaactggcccttgaacaccttgtattccttgcgggccctgaagtccctctgggccttctggacctgttggtcctatatcacccatcggaccttgtatcccttcaactccctgtggccctgttgctcctgatggccctggtactccttgtattccttgtggaccttgatctcctgttacccctgttgccccttgtggtcctatagccccttgtataccttgcggaccttgatctcctgttgctcccgttaccccttgaataccttgaactccttgtattccttgttcaccagttactcccgtcggaccaggaataccttgaataccctgcggaccttctggacctgttggcccaattggcccttgaatcccttgaatcccttggattccttgcaagccctgtgctcccgtgcttccagtaggacctgtacttcccgttgctcctgttacccctgtacttcctgtagctccagtattcccagttgctccagtcgcacctgtacttccactcggtccaccgcccggacctgtcgcaccagtcggccctgtcggaccaggaggtcctccagatggtccagttatcccagttggacctgttattccagtcgggcctgttatcccctgaccagttgctcccgttaaccccgtacttccagttagtccttgtgccccttgaattccttgagctccttgaattccttgaggaccagttacccctggcactccttgcacaccttggattcctcgaggtccctcaggtccagtagctccaatcggaccttgtaatccctgtacgccctgtatcccctgcgctccagttgctcctgtcgaaccaatcggaccttgaattccttgcaccccttgtaaacctgtcgctcctgttgctccttgtggcccccttaacccttgtggtccctgctgtccttctggtccagttgcacctattgaaccaactggtccttgtatcccttgcacaccttgaggtcctgtcgggcccatctcccccatcggaccttgtaaccctctcggtccttgaggaccagttggaccccgtggacctgttgggccagtaatccctatacctgtaaatccagttggaacaggagggaaagtaggtccaataagttcgggtggaattctaaaattagagcttaacgaattttgcttcccattattatcacgtttcttcacactttcaccacctacaaaccttctttttcataataaataaacctcttcttaatctattttcaaaaataatttccaagactatttttattttaaataataaaaactcccttaattccttaagggagtccagcaactgaatccatattatctatatttggcaccgcctgcatagtactcgacacatttgcaccttgcccagtattcgttcctgttacagtaccagcaggagtacctctcgtatacgttgttgtgacagaatctcctggctgtaaacaaagctttgtctccgtccctattacagtaacaacatcaatccaagtacaccccattgaaccactatacgatttcgaagcagtaaatgaagtgtctcttaaattatcgcccgtaaatatatttcctgtattattaacgataacaaactcttttatatgtgccggcatacttacacactacctttcctttacgaacctaacgtacgtgtacttgttgctaatggtggaagaaatactgatgttctaattaccgcttctggctgccttttcccatttaaaaaaatagccgcactcgcccctccggcacccgcatacgcttttgatacagcaaaaggtgagagatcataacaatcgccaacattaacagctcctgtattatttataatttttactttacgcatgttaattcccatcttctccatcctccttttatatactgtatgcaaaagaaaaaaaacttgaaacatactcgtttcaagtttttaactatttactatttcgtttcaccttcatattgaagcataccgccgaccatgttcactgttttaaatccttgctcatttaaataatgacatacattttcactgcgcattcctgaacgacaaataaagatatattcattctctttattaaagaaatctactttatgtgggatatcacccattttaatatgtacagcttctggaattttccctgccgctacttcttcatcttctcttacgtccactaaaaataacgtttctccattttctaaacgctcttgcacttcttctgtagtaattgttttaacttctgtcatatgtagttcctccttatatacaataaaacctttagtttctttttcacaaacattctctaccaattttagcatgcaaaagaaagaacgcaaagaatcgaaaaactatttctcaattttcccgcaaaacttattctttacaaacataactcttgcattgtatcctcaatatacttgttttatgaaaggagccaatgaaaatgacactttcccttttcattatgggcatcattttcttaatcgctgcaattattactctcagtatgaaaaataataaaaaaataaaatcctcacaagaaatgtcattcttatttctattgcttagcatagcgttctttggtatagcaatagctacatatattttccgtctacaaatcatgtgaaaaaaggtgcctactacaaacattgcaccttttccccatcatttttcttctacacaaaactagatactttccgattcaaaaattcataaacttttttttcaaataaataaatatcaagtgctcctgccatatgcccatttatactttctatctcatatacttccgcatatttcccttgtttttgcaaaatatctaccattttataattataacgagacggctgaagcaaatcttgtttacacggaatcataagcacattcgcttctatgttagaaagagattcttctagtgaagaaaacccatgtgcaatatcatgcaataaaactgccttcgcagtatacatccatgaatttgcatctactagctctaaacttgtatatgtcgctttatttatctctttttcaaatgatgttagtgtagaaaacttttcataaggttctacctctatactattacgaggaaatgtcatttcataaaaatgctcatcaaacgcgttcataaacatcattctatttgctaaatgaagcccctttatcggttgctgttctccatattttccatctttccaacttggatccagttgaattgcttcaatcgcattttgcgctacgtttactgacgtaataattggattttgtgggttcgtaataacgccaatcatccgctctaccatatgtggatagtgaaccgcccattgttgtgcaatcattccccccgccgacggtccgattacagcgtgtaaccttgaaattcccataccttttattaactcatattgcatacaagctacatcaagaaatgtaaaaaccggaaactccatagcatattcttctccagtttctggattaattgatttcggtcctgttgtaatcacatatggattcctcacctgcacattacaaagattatccgtacatataacaaaatacttatttgtatcaattgctttcccaggtccaatgagcccatcccaccaaccagactcctcatcatgcactgtatattttcccgccgcatgacttgttgcactaaaataatgacaaaccaaaatcacatttgacctttctctatttaacgtaccatatgtctcgtatcccatttgaacaggaatttccctaccattttcaaacgtaaactcttttaaaacaaacttctctttttttacaatttgcacagactctccctctccccgttatagtatgaactgcttactaaagatttttttccatgcaactaatctccttcttcttttcataaataaatgaataatatacaaaattagccacaaaatagcactatattacaagattaaagagggcatacatatgatttggaattggttacgtaagaaaaaaaaattaaataaaccagaagcaaacgaaagagataaccaggagcagcattctaacaatgaagaggatgataacaaagaacagactagaagtataaaacataataaaggtaaaaataacgagcaaaaagattcttctcaggataaacaacaaagcgctaaacaagatgaatcttctcaggataagcaacaaagttctaagcaagatgaatcttcacaggataaacaacaaagcgctaaacagaatgattcatttcaagataggcaacaaagtgctaaacaagatgattcatctcaagataaacaacaaagtgctaaacaagatgattcatctcaagataaacaacaaaaatctaaacgagatgaatcttcacaggataaacaacaaagcgctaaacagaatgattcatctcaagataggcaacaaagtgctaaacaagatgattcatttcaggataagcaacaaagcgctaaacaagatgattcgtttcaggataagcaacaaagctctaaacaagatgattcgtttcaggataagcaacaaagctctaaacaggatgattcgtctcaagataggcaacaaagtgctaaacaagatgattcatctcaagataaacaacaaagtgctaaacaaggtgattcgtctcaagataaacaacaaaacgctaagcaagatgaaccttctcaaagtaagcaacaaagctctggaggtaatagtatttatgactttacaaaaccagaaaaagaccgtattcattctctacaagatttaatagagaaacttaaaaagtctagtgattttattaattaccatacatctgacgatgaaacgatgccttattggatttcttactatcgcccttcacttgatggggagaaattacaaaaatatttaatgcctactcttttagagagaccttgtacttcgctagaagaactaaaagaacatattccgatgagtggcattacaattacgaacgacttgcaaaaaattgaagacatggttttaaagggacatgcgatcattcaattgaatcagcaagatcaaaaatgtatgcttgcaaacattgcaattgataattatcgtgcaccaacccctcctttaaacgaatcaactgttattggtccgcaagaaggtttcgtagaggctattgatacaaacattaatttagttcgaaaacgtctgcctgttttagatttacaaacaaaagaaatgattatcggcgagttttccaaaacgaaagttgtcatgatgtatttagacaacctcgctgaaaaagataatgtagattttctcgaggaatcattacgcgctcttgaatatgatcaaattaatgatagtgcttatatacaagaattgatgggtgaaaaatcaattttccctctatatatcaatacagaacgtactgatagagttacaaaagcgcttattgatgggaaaattgctatttttgttgatggttctccgagtgttttactaacaccggtatcctatttcgattttttcatttcaccagaagactataacgtctcctggatgtacgctacattttcaagggttttaagattaattgccgttctattttcaatttgcgctacaccgttatacgttgcagttttaaattatcattatgaacttattccgagtgatttacttgaaactttaattttatcaagagcacaagtaccgttcccgcctttaattgaagctctctttttagaacttgcaattgatttattaagagaagccggcgcaaggttaccgatgaaagttggtcaaacgctcggtatcgtagggggtatcgtaatcgggcaagcatctgtacaagcaggtttaacgagtaatattttattaattatcgttgccttatcagcactcgcttcctttattacacctatttataaaatgggtaatgcggttcgattactacgtttcccgtttctcatatttgcagaaataggaggacttttcggtatttcacttggatttatctttttattcacccatctgtttagacttacttctttacgcaagccgtacgctttgttctatccaacaagacaacaatctgttaaagattcttggatccgttttcctttaacaatgattgatacaagagatgtacaagcaagaccacaacatgtaaaaaaagctgcgaaaggaatttcaacaaaacatagatcggattttgatgattaagaaatgaggtgcattgatgagtaaagttcaagaaaaatatcaaatatctcctgtctttgttttcttcttaattcacggtgcacagtttggtgctggcgttctcggcttcgctcgaatcatcgcaaaggccgctggatacgacggatggatgggcgttctaatcacgggactctgtatccatctccttatatggatgatgtattttttattaaaagaaacaaatggaaatttaattgatttacaaaggcaaacgttcggaaagtggatagggaatatctttaatatcatctttgcagcttattttttaaacgtcagcatttcggttattcgaacatatgttgaaattattcaagtatggatgtttcctaccgcttccacctttatgttaacactctttttatgcttagttagctattacattatctcttctggatttcgtgtcattactggcatttgtgtcatctctgttggtggtacattaggatatttatttctaagcttattcgttttgaaatattcacattgggataatttactacctatattcacacattctttttcagacattttaaaatccgctcaactgtcaatctacagtatgaccggttttgagatttacctcatggtatatccatttgtgaaaaagcctatgcaatctcataaatacgctcagcttggagcactattttcaaatcttctatatttatttagcacccttttagcctttgcattttttagtgaaaaacaattattaaaaacgatatgggcacaactttctatgacccaagtcattcaattaccatttatagaaagactcgaatatattgcaatttcaggctacgcactcgttattatttcaagttttatcctccctttatgggcgtcaatgagagcaactcatgaaatattccgtgtaaaacaaagaggggttttaatcgcttttatccttatcaccctcattgtttcacaacttttaacaaacagacacgatattaataactttattagtaatgtatcaaaggttagtttttggctcatttatgtatacatcccaatcctatttattattgtgtgggtgaaaagaaaatggaaaaaatcaaaagcacaagcaaattaatacttatttcttgtataacattcttcagtctaattggatgtttacaaaaaaatattatcgacgatgtacaacttattcaaggatccgtatttgacgttgcaaaaggcaacaaagtaaaagtgacattcgtttgccccattcagaaaaaaggaaataaagttcaagtttttgaaggaactgcaaatgcggtaaaacaagtaaaagcagatacatcattagaatcttctcaaccttttgctagtggacaaatgcgtgtcgctctatatacgataagacttgccaaaacaggaatgtctacttcattcgatacattacttcgagatgtgaatatagggaacgctttatatgccgctttattagaggggaatggtactgaacttttaaaaggcaaatattccacttcatacaacgttgcaatttatataaaaaagttgttagaacataatatggagaccggtcctttaccaacggataatctgcatgtaggagcatttcgttattatcaagaagggcaagactactatattcccattctaaagaagcatggtgataaaataaaaatcactggaattggtctttttaaaaaggataaatatatcggtaaaattgcggaaaaagatatgttcatatttaaaggactattagagaaacataaattagattcacatgaatttaaaacagattctgcgtacgtaatgattaataatattcgttctgttccaacttacgatataaaaattaaaaacggaaagccttcttttttcattcacgttcgtcttgacgcacgtattcaagaactatcaaagcaaattaacttagaaaataacaagaacacaaaaaacattgaaaaagatgtccaaaaacaattagataaacaagctgctaagttaattaagcaatttaaatctttaggcgtcgatcctctcgggctaggtgcaaagtataagcaacattatcgcccattcaaattagaagaatggagacaaatgtataaagatgttccagttcatataaaatacaccgtgaatattacaaattctggtgtaattgaatgagaaatgattgaactcctctctccagcatgatacaacggagagaggagtttttattttagatagagagagaagatatttatgggggagcttatgtctaaaaaattagtaaagcctattttaaatggtattttatttctcggcgtctttttatttgctcatacatacttaaaaaatgtttccttcacacgttacttgcttgtcgttataccaatgttactcgtcggtatttttggcatcgatcttatttcatcgcttttaataaaaaaagaagaataacgagcgaacatcttatttcaataagatgttcttttcatttcataatcaccttatgttacaataaacttcggcataacgtaagaaaggatgaaacaacatgacaaacgaaaaaggtttagataaaggatacgaacttgttgcgaaaatgcatgaagtattcggacatcctgtgacaaatactccaacaaaattaacagaagagcgtgcaaaaatccgtgcaagttttatgcaggaagaactagaagaatttctagaggcaacgactgttgaagatcaatacgatgcactaattgaccttatttactttgcattcggaacgtttgccgaaatgggtgtacgtccagataaaggattcgaaattgtaaacaacgccaacatggcaaaactattccctgatgggaaacctcgattccgtgaaggcgacggtaagattctaaagccagaaggctggcaagcaccggaaccacaacttcgtgctgaaattgaacgtcagcgtcaagaagctgaaaaaaactgctaggatttcctagcagttttttattatggctttttttctgccaatcattaatgacccacgtgccctgcgtgtcctgctgctccactaatactagctgctcctgctgctgcccctgctcctcctgctccaattccacctgtccaaggagaagattgttgttgttgttgatattgctgatattgttggtgctgttggtgctgttgaccttggtatccatgatgttgaccttggtgtccatgatgttgaccttggtgtccatgatgttgaccttggtgtccatgatgttggccttgttgcccatgatgaccgtgttggccttgatgaccttggtgatggtggtgaccttggtgtccatgatgttggccttggtggtgatgtccatggtgaccatgttggccttggtgagtttgataaagaacagcttgcggatgaatgtggtggtgaccgtggtgatgtacttgttgcccctgatgaccatgatggccgtgttgaccttgatggtggtgatgaccttgatggccgtgttgaccttgatggtggtgatgtccatgatggccgtgttgaccttgatggtggtgatgtccatgatggccgtgttgaccttgatggtggtgatgtccatgatggccgtgttgaccttgatggtggtgatgtccatgatggccgtgttgaccttgatggtggtgatgtccatgatggccgtgttgaccttgatggtggtgatgtccatgatggccatgttgaccttgatggtggtgatgatgaccatggtagccgtgaactacttgcggatatccacctactcctcctgctacaacacctactcccggtacaggaaatcctgtctgtactcctccaacgaaagatggaaatgcagttggtacgcctactggtactcctcccgctgctccgccaacaaatgttgggattccagtttgcactccggctaccgatgatggaaatcctcctgttaatgttggaattccagtttgtacacccgctactgatgtagaaaaccctccaggtgttccgcccatccagctcggaattccaccgtatccttgttgtcctcctcccattaacatcatttgttcataactatccgatccactcccgaagaaaccatgtggtgcattattgtccatccctttcattcctttcacctcttctactcaatttagcctaccttttttatcatatttcctatagaagaataggtgtttgtctgcactagaattccgcttctttttcttcattcatgataaaattaattaactgaatattttttctaggaggtatttatattgaagaatgtaacaaaggcttctatcaatgatttagattcaatcgtccatatagatattgacgtaattggaaacgatagtagacgaaattatattaagcacactatccgtgaaggcagatgcatcattgtaacagaagaaaattctatctctggctttctaacatacgatacaaatttctttggttgtactttcctctcattaatcattgtttcaccaactaaaagaaggcaaggctatgcaagctcgttaatctcatatatgttaagtcattctcctactcaaaaaatattttcttcaacgaacgaatcgaatgaaagtatgcagaaagtatttaactcgaatggttttatacgtagcggaatagttgaaaacttagatgaaggtgaccctgagattattttctatacaaaaaagctcagaacataaacgctctgagctttttcaaatgatttagtttgcaacaacgttaacaagttttccaggaacaacaattactttacgaactgttttcccttcaatttggtcttgaattgcttcaagtgcaagttgttccatttcttcttttgatgcgtctttactcattgttagttttgcgcgaactttacccataacttgaacaacgatttcaacttcatcttctacaagtttagactcatcaaatgttggccagcttgcatatgtgattgtttcattgtatccaagtttgctccatagctcttccccgatatgaggtgcaactggtgcaatcatttttacgaaaccttctacatattctcttggaagtgtttcagctttgtatgcatcattgatgaataccatcatttgagaaatcgctgtgttgaagcgaagctctgcatagtcttctgttactttcttcactgtttgatggtaagctttttcaagctctttatttggtgcgtcagtaattttctcacttaattcaccgttatcttgaacgaatagacgccatacgcggtctaggaaacgacgagctccgtcaagaccattttcagaccaagcgattgaagcatctaatggtcccatgaacatttcgtatagacgaagtgtatctgcaccgtggcttgctacgatatcatcagggtttacaacgttaccttttgatttactcattttctcgttgttttcacctagaatcataccttggttgaataattgttggaacggttctttcgttggaactacaccgatatcgtataatactttatgccagaaacgagcatatagtaagtgaagtacagcgtgctctgcaccaccgatataaatatcaactggaagccattgttttactttttcaggatctacaagtgcttcgctattgtttggatcgatgtaacgtaggtaataccaacagctaccagcccattgcggcattgtatttgtttcacgacgaccttttttaccagtctcaggatcaacaacatttacccactcgtcaatgttagcaagtggtgattcacctgtacctgaaggacggatgttttctgttttcggaagaactaatggtaattcctcttctttcacagctgtcattgtaccatcttcccagtgaattactggaattggctcaccccagtaacgttgacggctgaataaccagtcacgtagacggtacgttactttttgatttcctgcgctcgttacttcaagccattcaatcatttttgcgattgcttcttctttatttaaaccatcaaggaatgctgagtttacgtgtgcaccatcacctgtgtacacttctttcgtaatatctccgccttttacaacttccttcattggaagattaaatactgatgcgaattcatagtcacgctcatcgtgagctggaactgccattacagcacctgttccgtaagttgcaagaacatagtcagcaatccagattggtaatttctcaccgtttactgggttaattgcgtaagcaccagtgaatacaccagttttttctttcgcaagttctgtacgctctagatcactcttcatttttacagcgttaatgtaagcttctaccgcttctttttgttctgctgttgtaatttctgcaacaagtgcatgttctggagctagtacacagtatgttgcaccaaataatgtatcagggcgtgttgtgaaaactgtgaatttctcgtctgtaccatcgatgttgaagtgtacttctgcaccttcagaacgaccgatccagttacgttgcatatcttttaagctttcaggccaatcaagctcatctagatcttctaatagacgatctccgtaagctgtaatttttaacatccactgtctcatcggacgacgctcaactggatgtccaccacgctcactcttaccgtcaatgatttcttcgtttgcaagtactgtaccaagtgctgggcaccagtttacaggtacttcatcaacgtaagctaagcctttttcaaatagttttaggaagatccattgcgtccacttatagtagtttggatctgttgtatttacttcacggtcccaatcgtaagagaaacctaatgatttaatttggttacggaacgtattaatattatgctctgtaaattcagctgggctgtttccagtatcaagtgcatattgctctgctggaagaccaaatgcatcccatcccattggatgaagaacgttatatccttgcatacgcttcatacgagataaaatatctgtcgctgtataaccttctggatgtcctacgtgtaagcctgcacctgatggatatgggaacatatctagtgcataaaattttggtttttctgtctcatctggcgtacggaatgttttattctcttcccagtacccttgccacttcttctcaatttcttgatgattaaagctcatgagataccctccttgaaattctatttattttcaccgcccaaaatacaaaaaacctctcatccctaaaaagggacgagaggttatagattcccgcggtaccaccctaaattaatgtacaaatatacattcgcttagatccgtaacgtggattaacggcaattgctactattagtttcacaactgcaactcaaaggcgagttcataacgaaacgtggattgacttgcaccgaccgtcaactctctaaaccagcttctattactactactccttctcactgttattacacatataagttacgtgaactatccttcacctagtatctcttaagagcttacttaaagcgaggacttctcggttaatcgttactcttaataactaacgaattcatcttaagacagccgagctatctcccttgttctaaaggttgttttatttaaatatattctaaaacatgttacatgttccgtcaaactaaactgcaattttttcttcaactgtttcttctacttttactcgtttatcataaatgctcgttgctataagcgctactacaagcattaccatgattgctataaacaatacttccatattgtataaatccacaattgctccgccaacgactggcccgaacattttccctacagtcgccgcactatttacaaccccttgataaaaacctaatttatcttttggtgcaagtatatttgcaatcgttggaaccgcaggccatacaaataactcacctattgttaatgttaccatcgcaacgaggaacatcgtaaattgttgcgcttgacttaacacaatgaatgaagctgcaaaaatgaagattccaatcataatttgctgttttaaagaacgcttcatccagcgaattagcatactaacaagtggctgcgcacaaacaatcatcgctccgtttatcgtccataataaactatagtgacgaaggctaatattcaattcttgcatatgtgttgcaatcgctccttgccactgtacgtatgtaacccagcataaagcatatgctacacacacgataagaagtgctttaaatccaggtgtaagtgaccacccttttttcgtttcgacttctttttgcactcctggctctttcttgtcttccataccgcggaatccaataaaagcaattaagaagaaaacaaagtataaaataaagttcgctaagaaaatataatcaaaacgatacgatgcaactaatccaccacatgctgttccgatcgcaataccaacattttgtccaacgtacatcgcattaaatgcccgtcttccgccttctggccaaaccgtaccaaccatcgcatacatcgatgggaagaccattccagaaccgaagccgattaacgctagccatacaacatataacggccaaccgtggaagaacacaagacctaaaattgatacaagtgtaatcacaatccctactaaagttgatttataaccgccccatttatcaaataaaacaccgccgagcaagtttccgattacaccagtaagcgagttgatcattaataccattccggccacagataaagattttcccaagtgatcatgtaaataaattgtattaaaaggccataaaaaagaagcacccgtgacattaataatcatcccagctactaatagccatactttccttggcatagcttcccctcctattctatttttttcgttcatatatataacagtaaaattgtagtcgtttttaaataggaaggcaactgattaatagttgatgaaattcagataatagttcgtcggtaaatgaatttatattggttgcttcttggattatatcagcgattatcagaatatatcggcgcaactacaaatatatcagcgattattaaaatatatcgacttaccgacaaaaaacgacaacagtaacaatatataaaagggtagactgcatgaaattttcatgcagtctacccttatttgtactatccaacttccttttctcgcttcacacgttctttagcactccatttaaacaccttatctagtagcgagtatattctcccagattctttcgttaacaaaggtcctaacgatgctaatattaaaacatacaaagctgagaacggtttaatcgctgccattaagccacccgcaattccaatattcgcgacgataatagaaaattctccgcgtgatacaagtgttaaaccgatattcgtagaagccttatgcgataacccagctttacgccccgcaaccattccagcagtaaaattaccgataagagtaatgaaaactgctcctaatgccaaccacactgctccgccaagtgaaaatgggtctatacttaaaccgaagctgaaaaagaatatagctccaaagaaatcacgaaacggaacgacaagctgttcaattcgatcactatgctctgtttcagaaaaaacgagtcctagtaataatgctccaattgcctctgcaacatgaatcgtttctgaaaatcctgctacaaagaacaaaatagcgaatattacaataataaaaatttcattggacgaaatatctaacattttatttaaaaaccgtgtagctttcctagcaactacaaagaatagtagcatataacctactgcgattaaaatagatgtaagagcacctacaaatgatgttgcccctccaagtactaatcctgaaacgactgataaatataccgctaaaaagatatcatcaaacataatgattcctaaaattagctccgtctctttattaccagatcttcttaaatcaacaattactttcgcaacaattgcactcgatgaaattgttatgatcccagcaataattaatgtttctaataaggggaaacccattatatatccgtaaagtaaacctaatataaaattaagcgatatatgaacagttcccccaaaagcaattgattttcctgatttaattaattttttaattgagaattctaaacctaagtaaaataggaggaatatgacgccaacacggccgaggaaggaaataacttctccactttcaataaatcttaaatcgataagccctaaatctggggcatgaggccccactagcataccgagtataataagaaacggaataatcgagaactttaactttgcagcgagaatagctgcaaaagcgactaatactaacgcagttccaacttcaaagattaaagtatccatcgattatgaatcccctcctactgaaagcaactcattaataattcttttcacttcatgtctttcacctgataatacgagcatatcgccagcttcaatgatagaatctgggcctggattaaagaacttcttcatattctttttcaaaatggcaataatcgttacgttatatgtgtttcgaacatgtaaactaccaattgttttttgtacaactggtgcattattttccaccttaaaccactcaattgataatccctcaaaagccatttcaatcgtatctaaagcttgtggcctatataccattccgcccaatatagctgcaatttgtctcgcttcagaatcacgaagagagacgcttgaaatactctcttcatgatcagcatcaaaatggtacatttctcttcggccatcatcatgaataacgataaccatcttttcattaccttttgtaatcacttcaaacttacatccaatacccggcagttcactctctctaatattcatattttccgcctcctaattttttagttacggcttttataaatcgacatcaatctccgttttaaagctctcatcctttgagatacctaaatactttagtgtctctgatggagtcgcgtgatgaaaatgtttttgcaatagcgcaatcgctatccctcttttgtacgcatgaaatccgaacgtttttcgcattgaattcgttccgattttaccaacaactccaactgcttctgcagcattatgaattacacgatacgcttgttggcgcgtaattgaatttggcgttttattagattgaaatacgtaattttctcttttaacgccaatagattgtacgtaatctaaaagcgcttcttttacttttgtatttaaataaatatcttgtttaaatttttcatctttcacaggaagagcataaaactctttaacagtcccgtcttcatttaatacatcttcaaatttcatgctaagtagttctgtaatttttaatcctgtgttaattccaataacaaataaaagataatctcgctgggagtgctcttttaaatattttttcatagcctcaatttggcttatatcttttaatgcctctacaacttccatacatgtattctcctcatcttatgaacggtaattttctcattatgttgtccattttaccttatcatgctatgagatttccatgtgttatccattattttcacaatatactcaggtggttctgaaaactttcaatgtggaaacttacgattgtataaatacgttgcggtaaaaaaatgtggggataaaagttcagcttctttctacagattggattcctcctttccttatacagctacttctacttttatattacgttacttacttacattatattatacatttcagtaacattaaagtattttttctgaaaataataaaaaccgagcgtttttgctcggtttttattattaatcttctttcggaagaacaattcctttatacaattgaactgtaatgaagtaataaatcgcataaataactacgaaaattacaattggtacccaaatacggaagtacggatcgattaaaataaatccgaaaatattcataccaactaatacgtgagcgatacccacaattgctgggaataagaatactaagaatagctctttataaatcgatttcgttagtaactcacggcgcacaccgattttacgcagcatttgataacgcgtaatatcttttgatgcaccagaaagaattttaaacataaggcagcttgccatcattgctaagaacgcaattccaaggaagaaccccataaatactgttccactcgcaatgccatagaacccactataagcttgatatttactatccatttgttcaacttttacatttttatatttatctagctgcaactcgtcaagttttttccattcttttttatatgttaaaaaatcatctgtttttccgataaatgctataccttctttaccatttatcccatcgtacattttttgatctacaattttaattgcatgatcattgtataaataatatggatggattgtactaaaagcatctgtccattccgctgaaagttctttagtattcgcatctttttgattcatctctctagaaactgcacctaccggtagttcctctgaaacttttttcgtatttactaaatccttcatagacttcatctttgccatatcttttacgaaaggacgatttttctctaaatcttcttttacatagtaaacgtatttatcatcaactttataacgatattcgcttttctctttaaatgtaataccatctaaaattttcttttcttcagctgttggattatgaactactgaatcatatattactaaaccatctaccatttttataacgttatttttgaacgccataccgcccgaaattgcaccagctccaagtgcaactaacattgccactgttgcaagtacttttgttaaactattaattcggaagtttaattgtgcaaatgtaaaagcattaagtcctttttcactacgctttttattactttttaactttttaataatgactggaagaagtgagccaaatagcatgtaagtaccagctgtcgttgtaattaatgcaataaggattcccatctcttttagtttttccatatagatcatagatgcataacctatacctaataaaataacagcaaggaatgccactacaactgtctttttaccttttactgcaacacgctctgtttgtgcatctgcatgtactagttgcaatacagaaatacgtgacaatttaatactgttcataattgctgataatacaaatagtgcaaagaagaagatgcaagtaacagtcatagatggtagataaaatgctttatacccttcaccagcaaattcaagctgtttcattaataactgtccaataccttctgcaagtcctactccaactgcaatcccaattgcaagagacgcagcacctaatacgattgtttcaataaacataagtaatgtaactttatgttttttcgcacctaacatcatatacataccgaactctttttgacgaagagataataagaaagagtttgcatataaaatgtagaagaacgttataattgctaataaaaatgatcctgcttggaatacgaatccaatagatttaatcactgaattagattctaaaaatgctttattcagtgctaacgtttggaacatgtaaaaaattgaaatcgacatgacaagaccgacaagtaagacgatataatctttcagcttacttttcagccccgacatggaaagtttaaataacatactggaacctcctttcttacgccttttgtgtacctaaatctgcaagtacatctaaaatttctttgtagaactcttcacgcgtaccaccgcgatgaatttctttatatagctcaccatcttgaatgaataaaatacgctgacagtaacttgcgctatatggatcatgcgtaaccatcataatcgatacgccttgatctttatttaagtttgtcatcgcatcaagtaaactcgttgcatttttagaatcaagcgctcctgttggctcgtcccctaaaataattgccggctcatgcactaaagcacgcgctgctgccgaacgttgcttttgcccaccagatacttcagatgggtacttttgaagtatttctgtaattcctaacatatccgctactttctcgacttttggtccaatgttacgtgatgcgacaccttgaagagaaagtggaagtgcaatgttttcataaatagataagttctctaataagttaaaatcttggaagataaatcctaatttttgcgaacggaaatctgaaagctcaccttgcttcatttttgtaatatccgttcccgcaatttcaacaacgccgcccgttgccttatctaacgttgaaattacatttaataatgtcgttttaccagaaccagatggtcccataattccaacaaactcaccctcttgaattgagaatgatacaccttttaacgcgtgtgattggttctcaccttttttaccgtacactttttgaacgtttttcacgtctacaactggtttcgtcatatatatcctcctacgcttgtttttccattacctattttgcgctttttagaagtgaactgctatttgttaacattacaattaccttacacttttgtaagatagaaaatggatgcgtgtaaggttggcttttcatactagttcacatttcgacatagtaaatcggtaaatgaaattatatcggcgattgttaaaatatatcagcggttcttacacttttatcagcgatttttcaaatatatcggcgattcttacacttttatcagcgattaccaaaatatatcgacttatcgacaaaagatgacaataaaaataggctgttccgcgaaaggaacagcccactgattaaagtttcactttatttctttaaaggtgttaccgtccagtacgtaataacacgccaaacccattctaatggacccattttaaagattttcatccaaattacactaaacacaatttgaattgcataaattgcgatacatacatatagcgtctgcatgtatgttaagttacctgcaaagttaaatacactaccagcaattaaaatcattgccgtttgtccgatataatttgttaaagccatacgaccgtagtatttcaatggtgctaataatgtttgaactggttttaactgaagtaataaaattaatgctcctacatagaaagctgaaataattggtccaacattaataccaatttttagaaactggcttgcagcatccattgttccatcttcattcatcaatatcatatttacaaatgggccagcaggcacgtgtccatattgataccatacagctgccacacttaaaacaaacataatgcctgtaaaaatagcgacttgctttatgttttttgaaagattttcaaatacacgatattgtcctgcagcaagtcctaataaaattaagccaagtggtaatagttctttaactcccattacactgaaggcaattgtcaaaataagtcctagtgctaggttcacttcttttttcgctttataaaacggcaaaacgattaacccacaaattgcgtataacgctagtgcttctccaggctgaaacatttgatgaattaaaccaaaaataaataatgcaactacgcggcggaaaaatagaacatatccatttttccctttcgcaatcgctcttgtaatgaagatatagaatcccactccaaataagaatgagaaaatcgagaagaaacgaccttctacaaataagtatagaaacctttgatagctagcatctactgtattaggatctggagttttaatattaagtagtgctaaaatatttactaaaataatccccagtaatgcgaagccacgaatgtaatctaactcatcaattcgtttgtttgtaatattgttccccataaagcagctccttgtccaaaatttaatcctcccttactctactggaaaaggacaattacaactatcggcaaaccttacagaaatcttacactattgtcatatagcaaaataaaaccaggtcatatttcgacctggtttactctgattgttttgatttttgaggttgtccttttttactattacgctgttttacttgaacaatgggatcaagttcattcgaaaactcagcgttatgtccattttgtgttttttgctctgggttattttgatctgaacgtttcgccattacattcactccttattagtgcggtgtaataatcatttgatgttgcaattggcgaattgccatacgtgctctatttaattgctcacgttgctcatcattcgcatgttgttgcatcgtttgtaaatcgttatacgcttgttctaattgtaactgtgcatctgaatactccatcgtattgtaatgctcttgtctcatgccttgttctaattgttcttttgcatattccaccgcttgttccgcttgtgtaatatacgattcaagtgattgacgctctgccataattgtccctccttgcttcaattcccctttagtgtgtcccttccatctctaccttatgagtatgttataatggattttgtttcattttgactcggcttaggagggaaaataatgaaggttcaaaacccttttccatatacaaacgacaataaacgttatcatacatggaattaccatttacgaaatgaatttggtgaaaaaatctttaaagtttcattagatgctggcttcgattgtccgaaccgtgatggtacagttgcttacggtggttgtacattttgcagcgctgccggatctggcgacttcgctggtgatcgccgcgatgatgttataacacaatatcatgaaatgaaagaaaaaatgcgctcaaagtggaaagatggaaaatgtatcgcttatttccaagcgtacacaaatacacacgcaccacttgaagtgttaaaagaaaaattcgaaccgcttctagcagaaaaagatgttgtcggtctttctatcgcaactcgtccagattgtttaccagacgatgtcgttgaatatttagcggacttaaataaacgtacgtatctttgggttgaacttggactacaaaccgttcatgaacgcactgcaaaccttattaatcgcgctcacgattatccgtcttacgtggaaggcgtaaataaattacgtaagcacggcattagagtttgctctcatattattaacggtcttccacttgaagattacgacatgatgatggaaacagctcgtgaagtagcgaaacttgatgtacaaggaattaaaatccacttacttcacttattaaaaggaacgccaatggtgaagcaatatgaaaaaggacaactcgaattcctttctcttgaggattacgtaagtcttgttgttgaccaacttgaaattattccagaagacgtaattgtgcaccgtatcacaggtgacggcccacctgatttaatgattggtccaatgtggagcttaaataaatgggaagtattaaattccatcgatgcagaatttgtacgccgcggaagctggcaaggaaaatatgcaaatgaggagaaacaacaatgaaattagaacgtgtattaccgtttgctcgcacactgctgcaaacggctgttaaagaaggcgactacgctgtagatgcaacacttggaaatggtcatgacacttgcttcctagctgaaattgttggggatagcggaaaagtatttggatttgatattcaaaaagaagcgattgaaagctcaacaactcgtctaaaagaaaaagaactttttgaacgtactgttttagttcacgatagtcacgatacacttctatccgtactaccagaagacgcaaaaggaaaagtaacaggcgctatcttcaacttaggttaccttcctggcggtgacaagcatatcgttacaaaaccgaactcaacaatttcggcaattgaacaattactagaagtaatggcacctgaaggtatcatcgtcctcgtcacttaccacggacacccagaaggacaagtagaacgcgacgctgttctcaaatttgcagaagagctagaccaaaaacaagctcacgtactgcgatatggcttcattaaccaacaaaacaacccgccatttattgtggcgattgagaaacgataaagtgaaactttaatcagtggggggaatccccactgattattagttgaaccaatcgggcatttatgggcagtttatttcccaactaacttctttgctccaggcgaattttaaggtgggagttttactgcccgttaatgcggggtaatatatcaacgatttttcaattatatctatcgtaactcgggatatataaacgattttttcgatatatctatcataacttacaatatatcaacgatttctcggatatatcgacgattcgacaaaacataacaaaaaaagacgtgcactcactgcacgtctttttgttattctcctatataatggatataaacattcttaaaggagacgagacaatgatcggaatactagcaggaatggggccaaaatcaactggaccattcgtcgatacagttgtagcagggtgccaaacaatatacggagcaaagcatgatatggactttcctcatatgatgatttattcgtgcccaacaccgttttacatggatcgccctattgatcacgaagcgatgaaaaaagcgattattgaaggagcacaaaaacttgaaagtactggcgcaagctttatcgctatgccgtgcaatacggcgcatctttattttgaagaattacagcgttctctttctatcccgattttaaatatagttgacgaaacgttacaagcaattcctgaaactgcaaaaagagtcgctcttcttgcaacggaagcgacagttcaagctggtatttatcaagacgggattgcaaaacggaatatagaatacattcattatgaaaaatggcaaacgatgattaatcaaattattatgtatattaaaagcggagaagttgaagaagctcgcaaattatggagcgcgctcattgtgcagttgaaggatgaagtagataccgcaattatcgcatgtactgatttgaatgttgtggctagtgaggattttgttgattcttctcaatgtcttgcgaaagcggttgttaggatgtacttatcaaatataaagagatcttcataaacatagaaaacactccttctaaaatgtgttttatgtttaataaaaatcccacaaacttttaactttcttcacaattctttcaaagtaatcacacttaatctcgctatattaaataagtagttattcatatagggaaggttaggggaactgaaagtatgaaagtaaatcgttcgcttcattacattttttggcgttggcatttttatgctgggctttttattacgccacttcttattacgttgtcactgagcggaattgggtatttatttcgagaggaagttgaagatttcatctataaagatttatattttgggaagagcgctcaaacagaatctatttcgatggctgattctatttcgttaacagagaaaaaatatccacattatagtgtggcgaaaattagtgagtttaatggggattataatacgagacttaccattgcaaatgagtatactggacaacaaaaatatgtgtatttagatagtaataatcaaattgttggggatcaaaatgcaagtgaaacgtttgccaatataatgagggaattacatagttctcttttagttggtggcactgtcgtcaactatactgtagaacttgcggcatgctggactatctttttaatcgtgactgggttgtacatgagtatacgccagttcaaaaacaaaccggcatccaataagcgagaaaaagcaaaacgacgtcattctattatcggtattatatttacaattccactcgttctgctagtcgcatctggattgccatggtcaggatttatgggtaaccaaatttataaaattgcgtcgtcgaatgaatcgctcggatatccgaaattgtatatggcgccgcctgaatcaaaggtaaaagaattgccgtgggcaacaagaaaagaagctccgcctgaatcgaattcaaatgaaccgaaagcaatttctgtcgatgaattacaaaaaggaattgaaataaagaagccatatgttatttcactaccagctgatccaaaaggtgtattcaccgtttcgaaatcgagcggttctggtattacaggtatgcatgttgcaccaaatgaagagataacagcttactttgatcaatatagcggggaattcatttcaaaaacggactatcgtgattatggattacttgcacaatggttcacttacggcatcccgcttcatgaaggacatttattcggatggccaaataaaatattatgcttactaacgacattatctctactacttcttatttattacggagtaaaaatgtggttagcaagaaagccgaaaggaaaattagcagcaccaccaaagcaaagagataagaaaagcataatcgttttctttatcatgatggttatactaggcgctgccatgcctttattcggactatctgtattagtgatttttgcgattgaacttcttatatatgtattttcaaaaatacgatcataataaaaagcatttgtacacgcgttgtacaaatgctttttatttctctctagatcacttatctatcttcaatggcattttcttttttattaataacttttttatctttccagccaataacacacttcccaccattaaaattaaatccccccaatgtattcaccacaatttgtacttaaaacaaattgtgtacagcgattaataataatataaatccacttaaagctgtgctaaattgtcctaatgtccaagatccaatttttacatttgcaactttttttcctaatttaactcctaaccaaacagtgaaaaaactgaatacagctgctgataatgaaatagcaaatggagataattttaataaacctgcacctagtccattcgttagagcattcatcgatatagcaataccaagaacaatagattcaaaaaaactaatattccctgatctatcaaggtcagctttttcaggagattttaaatatccagtaataacattcgaaacagattcatcttcatcaagtacttcttgattagccttctttttttgtggaattgtcattaaaataattcgtaaaccaattacaaacaaaaacaatgtaccaataacgtcagataatgtacctggaaaaacttttgaaatatattgcccaaacaaaatacccatttcactaaaaataaaagcaataattgcaattataaagttagctaaaaaacctattcgaatattacgaatcccataagatagccctactccaaaattatctatactagaagataacgaaagtaataaaatggtaattaaagctactatagtcataattgtcatactccttttcacaaaaaacagcaagttattttctgggttattgtatgataggtgaaaaaaagtgttcctacttaagatgaggctactgaaaaagcccaccacctactatatacaacagatcgtggaccctttttattttctgtatactgataaaatacgccattttcaaaataacaaaaaagacactcataagagtgtctttaactaaattagtggttttcttcatcactgcgctgttttctttcggtacatcttcccgttccaatagaagaatcgtgaagtgaggcctccgtactttacaatgcgccgtgccattttgtgcatattcttttgtgctgatactttttgatctgataaataaataccaagtaaccctctgcttatgagacgatgaaacttcgcatgaggcaaatcaccaatgctcttctctgcttcttctacaaagtgtttcatccgatctaatatcgcttgctcgttttcgtaataactacagaaattcaaatctccgcctatacggtcttcttcttgatcaatgaaataatcaagcaaaatatgaagtccttgtacgtaagggaagtatccttgtctaattttcgcaatatcttcatcatgtaattcatcatgaaatgcatatgcaacaagacagaaaattccaagtgtagaaccggcacatgctgaaaattcaaaccaactcatctcaggtaagttttctttatgtgcttcaaaccaatttttcagtcgcggctctctttcttctaatttcacgtgtttatgaatttgcaaatcacaataataacaagcaagttcatgaagaacaggagcaattttgtcatagtgcttcgttttctttaaaacatcttggcatgtttcaacaagttcatctaaataaccaccatcatcttgatcatcacgataacgataataattaccgccaccttctacttcaggtgataatgccattaacatcgattcatgcagtgcggcaaaatcatttggatcaagtgatgtactgcgatcacataaattatctaaatagtcgctgatcgtttgatacgctacgataaaacgaatacattcttctcggtgttcatttgctagcagagctaaaatgccaccgccctcacaatgaaacgttttatgctcaatacttgcgattgcctgactatgaagctcatcattcggaatatggtaggcacgctctttccacatcgctagctcatggtgtacaaccggaaacacatcacggtatactttcgccatgagcgttatgggattactcggtacgttcacttcttccttcatctcctctattaaatgtacaaataatgatttatttgtttgtttttactatattattgacatgcatttcagtaaatgactgaatataactcaaaatttcatcacgctcatactcatttaatagctcgtgataacaattcggccattctttaaaagccttatcacttattttaacattatcaaaccaagtgcggacacgtattttatctacaagtttatcctcacaagcttgcattagcaagagcggaacatctggaaaatcatctatttttttatgagcaatttcgatagacttaatcaattcactataccaacgtactgatactttgcgcaagaacaaagaatcattctccattgcatctctcacttcatggttacgtgttgacatttccaccgtaagattcgttgcaaattgcaattttggagccacaacatttaatattcttgaagcaaattgaagcggagcagagggtccagtcactacccctaaacaaggcgaactcaaaataataccctctacatcttctctcttcgtttcttgcatcatacgaatgacaataagaccacccatactatgaccgaatagaaaaataggtaacctatactttcttgcttctttcacccataatttaacttcctctatgtattcatcaaatgaatcaatatgtcctctatttcttgaagtcgttccatgtgacggaagatcccccatcacgacgtggtagccgatatgattccacatttccgcaacggcttcgtaacgtccgtgatattccattgcgccgtgcacaataacaatgacagcttttgcttcctccgcttcataattccacatacggctctcctccatttcactctttctcataatttgatacactaaaactagtctctaggaaaggaagactttacatgatatatccttacaaagaaaaaaaaccgaaaattgcgagtagtgcttttatcgctgactatgttacgattacaggcgatgtttccgttggcgaggaatcaagtatttggtttaatacagtcatccgtggtgatgtgtcaccgacaatcattggagaccgagtaaatgtacaagaccaatgtacacttcaccaaagcccgcagtatcctcttattttagaaaacgacgtaacaattgggcatcaagtcattttacatagttgccatattaagaaagatgctttaattggaatgggatctattatattagatggtgctgaaattggcgaaggagcttttatcggcgctggaagcctcgtttcacaaggaaagaaaattccgccgaacacgttagctttcggtcgtcccgcgaaagtcattcgtgaattaacagaagaagaccgtaaagatatggagcgtattcgcacgcaatacgttgaaaaaggtcaatattataaatcattacagaagtaaatttccgctgccataagattggcagctttttttatataaaatctaactttttctttacaaaacattattactccctcaacaaaatcttattaaaataaaagctaatatctccatatatatgtagatgagggaggagaattttcatgaaggtcagtggattatataaaatagaatgttacattttcagaggaattaaccgctactttgatcaaaaaacattaaatatctttttcagcaatattactcatatcggtggcgcgactttctccatcggactcacacttttctttttaattttcgcaaagggaactttgcatcaagctgcaattgcaactgctatttcgttagcaattagccatattcctgtgcaaatattaaaaaggtggtatccgcgaaaacgtccttatttaacaattcaggatgcaaaatatccagtccatccattaaaagaccactctttcccgtctggtcatacaacagccgttttctctgtcttcattccatttatttgctataatccaagcttacttgctttcctattaccgttagcgttatgcgtcggtatttcacgtatttatttaggccttcactatccgtcagatgtattcgtcggtatgtgccttggcacttgttctggcatcatctctttttatcaattcatcccacttttcacataaaggagtgatatgatgagagtcgccatttttaccgatacttttacgccacaagttaacggggttgcgaaaacgttagagcgattaacacaatattttcagaaagaacagatcgcctattctgttttcgcccctcagcatacagctgaagataattttgtagcgaatgtgaataagatgagaagtatcccgttaacaatattatatccagaatgtcgtttttcttttcctactccgcgcattaaacgggaactactttcctttaaacctgacattattcacattgccacacctttcaacatgggactttgtggattgtattatgcaaaaaagttaaacatcccagttgtcggttcttatcatactgatttcgatgcctatttacgttattacaaaatcgaattcctctccaatatgctgtggaactatttaaaatggtttcatagtcatatgcaaaaaaattttgtaccttcctttgaaacattacatcaattaaaaaacaaaggctttcagaccctctctatatggggacgtggtgtagattgcacactctttcatcctgcttacaatacagacctattccgaaaaaaatataatattacagcgaagtatgtcctttcctatgttggacgaattgctcctgaaaaagatattgatacgctgcaacaccttatcgttaaaacagcacatactcgaaacgatattcattggctcattgcaggagacggtcctctagcaacaagtttacgtgaagctgttccgaaaacaaatatcacttttactggctatttacaaagtgcagatttagctgaagcatatgcttgttctaacataatggtgtttccatcagctactgaaacattcggaaatgtcgtacttgaatcactcgcatgcggtacacctgtcattggtgcaaatagtggcggggttaaaaatattattacagatggaaaaacgggagttctttgtccgcctaaaaatgaagatgcatttctatcatccatttattttttattacaaaatgaagaaaaacttgagcagatgggaatatcagcttcatcttttgcgaaatcaaagagctgggatgagatctttcgcggtttgcttaaccattatgaagaagtcctgcagcataacgcatcagagttgcttgcttaaatagaaaaactcccttcaaaaaaacgaagggagtttattacatggtcataaattttagtttaataaatgatacataaggttaaacattgttttatttctatattaattatatcaaaaataaacataactaaacagacttgtaataaaaacccataaaaattaatatatggttatacagtattttaaactgtataatgattttaagaattccccttaaaatcaacttactcacatacctttatacagtaattgttccccaattctgtatatcaaaaaacctttcattcatttgaaaggtctttttgagcctgcacatattcttctttcgtatttacatttataaaccaatccgcattcgcttgtacatcttctccagaaacatacttcacattacattgtgataaaagctggcccatacttcttttttcttcctgaagtaaagcataaatcttttctttcacgcggttatgatacgccgcaagtagcggttgttttcttccattaataataggtacaaccgcatcatattcattgctcgtttgctctagtaaaatggcaaaccattgatgcgaaacgtttggtgcatcgcaaggcataatagcgtaccaatctgcttctatgtattccatacctgatacaatgcccgcaagcggtccatttcctttatagtgcggaatgtcttctataacaggaacttgtacgaattgctctactcgctcttttatatcagtatggctaattactacaatgtcttgcaaagtagttcccatcactttcacaatatgctcaacaaaagtagttcccttccaaattgctaacgccttcggctcaccaaatctactcgacataccgcccgctaatacaattccagcatacttactcattggcgatgcagctcaaatgtaatatggcctaattccggtaaaattaatttattcatcgcaagtcgaaccgctccgctagaccctggcatcgagaagactactttgcgcccaattgtaccaccaatcgctctacttaacattgcgctgcttccgatatcttctaaataactaatcatacggaacagctcaccaaatccaacaatttctttatctaataacgctgatactgcttcaattgtgacatcgcgtttcgtaataccagtaccgccatttgttaatacaacatctacatcttccttatgataaccagctaacaccgcttgctgaatactttctttatcatcttttacaatttcataagaagttactttatgtcccgcttcttttaacaattcatgtaatagttgtccgctcttatctgtttcttccgtacgtgtatcggaaattgtaacaatcttgcaacgcacttcttttggagcttgttttttatgttcagttacactcattttttatctttcctttcttaaagacttttcttcattttatcatacatacctttacacaattatgtatgaagccaatcatgcgccatgatacaatataagtatactaacccacaaaaaggaaagtgtactttcttatactcctagactacacatctttagctactctttatattttctacataatagaattcaattttaaaacttgtactaaaaaataaattggaggtctacattgtatggaactttataaaaaattaacaacaacatttatcctcttattcatcgcttcaatcactgtcggcttttccttaaaaggcgcaattccatacgctacattagtaagcattatattcgcgacactatttttactaagtagtgccttttgcgcaagtaaagcacgtcaaatgaaaggttgatcacatatgttcaaaaagaaatcaatcttttgtaaatcatgtaaaacagaaatacaaacgtatgaaaaagcgtggattcatatgccctttccggcgaatgacatgacgaatatgaaaaagtatattgaattagaaggacaaatttattgtagttcgtgtgttgagataatgaacaaaaaccagtaaatacaaaaggggtgtttacattgtttgaatccaaccgtatccagttacgaaagttttccgaagatgatattctaacatattataaatggcataatgatatagacgttatgagttcaactacactcactcttgataaatattcctttcaagacacagaaaaactttgccggcaatttattcattcttcgaactctaagacctatatcattgaagaaaaagctacgcatcttccaattggtattacttctttaattcatattgattcgtataatcgaaacgctgaatgcattattgatattggtaaaaaggattactgggggcaaggttatgggcaggaagctttaaccctattattggattatgcatttttagaattaaatttacatcgcctttctttacgagtattttcttttaacgatagagcagttaaattatataaatcacttggttttcaacatgaaggaacttgtaaagaagctatattccgcaacggcacttggcatgacattgaactcttcgctttattccaacgtaattataaataaaaaaagctttgcgctcaccgcgcaaagctttttttcatatattatagaccagcttgctcttttaaagctgcagctttgtctgtacgttcccatgatagatctacatcagtacgtccgaagtggccgtaagctgctgtttgtttgtaaattgggcgacgtaagtctaacattttaataataccagccgggcgaagatcgaagttgttacgaactagttctactagtacgtcttcagatactttaccagtgccgaatgtatcaactgaaattgatactggttgtgctacaccgattgcgtatgcaagttgtacttctgctttttcagcaagaccagctgctacgatgtttttcgcaacataacgagctgcatatgctgcagaacggtcaactttcgttgcatctttaccagagaatgcaccgccaccgtggcgagcgtatccaccgtaagtatcaacgatgattttacgtcctgttaaaccagcatcaccttgtggtccaccaattacgaagcggccagttggattaatgaagaatttcgtttctccatccattaattctgctggtactacagctttaattacgtgctcttttaagtcgcgatcgatttcttcccatgtaacatctggatgatgttgtgtagaaattacgatagtatcaacacgtactggtttaccattttcatcatactcaactgtaacttgcgtttttccatctggacgtaagtatgataatgtatcatctttacgtacttcagttaaacggcgagctaatttgtgagcaagcgagattggaagtggcattaattcttgtgtttcattacatgcaaaaccaaacattaaaccttggtctcctgcaccaattgcctcaatctcagcgtcagtcatttgaccttcgcgtgcttctagcgcttggtcaacacccatagcgatgtcagcagactgctcatcgatagatgttaaaacagcacaagtttctgcatcgaatccgtattttgcgcgtgtgtaaccaatgccttgaattgtttcacgaacgattttcggaatatctacgtaagtagaagtcgtaatttcccccgctaccaatactaaaccagttgttacagttgtttcacaagctacacgtgcatttgcgtcttttgataagatcgcatctaaaattgaatcagaaatttggtcacaaattttatctggatgtccttcagttacagactcagatgtgaacagatgacgtttttttgtcatgtggtaaacctccctacagtaattgtatatattgtacggaactcatccttaatttgccacaaactgcgacatacatttattctcccacacaagcatacagaaaaacctttcctactttacatagaggaaaggtttaatttgctacttgcatactgctttttgcccttcgctcttatcgttcgagacctgtagcctcgcacaggttttagcacctattcacctgcatttatcaatacaagtgaggttgctgggcttcatcgggcctgtccctccgccagctcgggataagagagtatccgtcccaacctatactaaagaaatgatattcatttgtcaattaatattcacattttcctgaaagtttttctcaatacgcctgaaatgaaatattaataaggaaataatgcattcacacaaacaaaaagaaataaatagtatacattatttatataattgtgttatactcttgttggggattacgagaaatatttcattaaatgaaaaggatggtatataaatatgagtactgtgaatgtccaaattggtttacacgaattattgaacggaagcaatgcacagattcaactaagtgttccgcaattagtggaaaaagtattaatgcgaaatgaagggaaattaacttctactggtgccgtttctgcttcaacaggaaaatatacaggacgttctcctaaagataaatttattgtgaaagaagcatcggttgctgacaaaattgcttggggagctgtgaaccaaccgatttctgaagaacattttaataaattatatactaaagttttagaatacttaaaagaaaaagaagagttattcgtcttcaaaggatttgcaggcgctgaccgcaattaccgcctaccaattcaagttattaacgaatatgcatggcacaatttatttgtacatcaattattcattcgtccaactgaagaagaattaacgactcatgaatcagagttcacaattgtttctgcaccgaatttcaaagctgatccagctgttgacggtacaaactctgaagcattcattatggtttcattcgaaaaacgcatcgtattaattggtggtacagaatacgctggagaaatgaaaaaatcaatcttctctattatgaacttcttattacctgaacaagatattctttctatgcactgttctgcaaacgtaggtgaagaaggcgatgtagcattattcttcggtttatctggaacaggtaaaacaacattatctgctgatccaaaccgtaaattaattggtgatgatgagcacggttggtctgataacggtgtattcaatattgaaggcggttgctacgcgaaatgtgtaaacctttctcacgagaaagaaccacaaattttcgatgcaatcacatttggatctgttttagaaaacgttatcattaatgaccaaacgcgtatcgcagactataacgatactactttaacagaaaatactcgtgctgcataccctatgcatgcgatcgacaatatcgtactgccaagtgttgctggacacccaaatacaatcattttcttaactgctgatgcatctggcgtattgcctccaatcagtaagttatcaaaagaacaagctatgtatcatttcttaagtggttacactagtaaactagcaggaacagagcgcggtgttacatctccgcaagcaacattctcaacttgcttcggttcaccattcttaccacttgatgcatctcgctatgctgaaatgcttggtgaaaaaattgagaaacacgatgcgaaagtattcttagtaaacactggctggactggtggcgaatacggcgttggtaaacgtatgaacttaggttacactcgtgcaatgattcaagctgcattaaacggtgaacttgcgaaaactgaaacagctaaacatgacatcttcggtcttgaagttccacttcacgtaccaggtgtacctgacgaagtgttaatgcctgaacaaacttgggctgataaagctgcttacaaagcaaaagcaatcgaacttgcaaatgaattcaaagctaacttcaaaaagttcgacagcgtatctgaagacattattaacttaggcggtccaatcgcttaaattaaaactttctgttggaataaccctttactcatatgaataagtgtcgtgtaaccgtaaagtttcgcgtactcaccgacaaaacccaatgcggcttaacggttacacacacttacataaaaaagaagcttacgtgaaaacgtaagcttctttctatatcttatataaagtgaaacgctaatctcttcatctatgacctagattataaaattacagcttcgaatatatacattatatccctactgggtttcacatcgtatggggctaaaaaaggccctgaccgcttctatccgtggctggatcatctattccatctaaaaagaagtcttttatcttttttagctctttgttagttctttctcatctttcatgctatagtatcctaaattaacaacaattaagaaatacccacccaaaatccctactgcaaatgcccacataaccatgtggtgctcaatttcgtacataataatagcacccaaaattgcagctgcaaaacggttaaacataccgagtgtcggtgctttcgtcttctttacaatactatctccaagcttctcaattcgtctccctaaaagccaaacgcaatacatacttacaataagcccaattccagcacctagaaaatgagctgaaaacggcgttaacatccagcctagtaaaagaaaacctagtaaataatacgattgaattttaaacgatcttaatgacatactaatcatgctgttctcctcttcagtaatttttatctatccaacaaaaaatttctttcaaattcatattccttacatccatttcactcaaattaaaaacaacataaacagtatgtttatgttgtttaaatatttttaggaaataatattatacaagatttaaaacatcatattctcatattttgtgacggtttttcaaacttttttcgtccatttatgaaaaaaatgatatcaatctatgaacatacggatatgatgtaataagcacacaaataaagggggcgtctaatgatttattttttaatggctctcattcacctcattatccctgcacttattggactttcattgtattggtacacgaaaaaccatagcattttttacgctgtcctcggtgttcttcttccaggtattattcttattacactcttccgtattccatttttaaacttaattccacttattactgctatcttatttctcatcttcttaccaaaaataaaaaaataggaaagcagatcataggtgatctgttttcctattttgatataggttcccctgcaatagaatgaacttttactttctccgatttcacaaaccatagaccgacaaaaatgataattccaccgatgatttgttgaaacgatacatattcatttgcccagacagctgcaaataaaacagctacaagcggcgttatatacatatataccatcgtatgtgacgccccaattttttgaacaccaacataccacattactagaccaaatactgttacaaagaaaatagaatatagtaaagcaaatagtgtcattccgtgagtaatgtgaaatggcatgacaaacacatgtggaccacttaacaataatagcggaatcgcacccactaatgcagaccatgctgtaacacgtaatgctgaatattttttaattaatggtcctgctaaaacaggataaagcccccagcatattgatgtaataagtccaattccattgccataaaaagaactagtaagcgaatgtcctgctactaaaactaatgctgcaccaacaaaggcagtcatagaaccgattaactttcgagaagaaaacttttcttgtttcaagaaaatcgcaaatgcagttgtaaaaataggtgaaatagaaatgagtaaagaggcatttgtagcagatgtatatttgacagtttccataaataacgtttgatacagtacaatacctacaatgctaacgataattaatctaggtatatcctttcgctccatataaaccgacttttcaataaaaaaggtaaggagtaacagaagcggtgccgccgccatcatgcgaagtgcagtaaactcaattgctgtaaattctaaaagtccatacttcgcaattgtatagttaatcccccaaataataacaacacttaaaattaacaactcaattccccatcttctcatgcgtatcccctccgcaaagaagattatacagaaaattcaatcacatgtacatttcattatgtgaaaaaatctttttacttttgaaacgttttggtaaatgaaattatatcggcgattttctgaatatatcggtgcaactccatttatatcggcgatttcccaaatatatcagcgcaactccatttatatcagcgattttttcaatatatcgacttatcaacaaaaatcgacaataatagcgacttataaaataaaaaaggtgattccaaaatacattttggaatcacctttcctttactatattcgaacgtgtaacttcatatttggattataaaactggcttgggctcttcaactgaaaagttcctccaccttcatgccaatcaaccgttaacttatcgtccataaatacaagctttgtacgatcagcgataaagttcattgtgcttgattcaatatccacatcgcgctcatctttctctgctacagctactaaatcgatgattccgctcatgacacaaccgcaaccctcattatcgtaaaataactttatatatttcgcttcacttggaatcgtatccataatctttttatatgctgcttctgttacagtaacgtacatatgttaatcttcatcctctcttctcttatcattcatatattgtatcatcatttttcttaaaagttatatacagaaaattaagactaatatacaatgtatgtgataaagtttcagtaatcgagcttttatgagtagttcatgcaggagaaaggatgtttactatccgtgttcaaactacaacgatatcccatgttattaggtctatttagtagtttcttcatttctagcggaatgctattacagcatgtacttccctattctccttctattagctggatcctaggttttatttgtttcctatccgcttcttattttgctacgaagaatacaaacaactcataaagcaagaatcatcttaaggaggattatcaaacatgccagccttaaaaaaaatagagcaatcactcgatcacttattccaaattgaaaaatacggaaaagatagtgcctttagtcgatttatcccagccatatatgatcctatcaaatttccttggcaacaatttttcgaagcaaattttgtagatttatttaacggccttatgatgcacggatctgaaaatgtaaacaaagtatttttagctgtattccctacagatgacattcttgaaacattcatttcacaatccacacctggtgatttactctttatgcaccatccccttgtaatggagtgtggtgatccgcttggaagatcaggtcgcggtttcataccaattcctgaaaaatatttgcaaggaataaaagaaaaacaactttctatatatacatgtcatgtaccaatggattttcatcaaacgcatggaacgagtatttcaattgcaaaagcattaaacgctactgtagtggacgactttgcatatggaggtccagaacaagaaccaattggccttatttgtgaaatagatgaaacatcaacagaagcactccaaaaacatctaaaacaactcttccagattccttacacagacttcgaaggtaaacgacatgattccattaaaaaaatcgcaattatcgctgggtgtggcgatgttgtatctttaatgaaggaagcagaagaaaaaggtgctgaagcatatattacaggagaaatccactgccatatcgacaatgattacggccgacataaatactcgctcattatggattatgtaaaagaaacgaatatgtctctaattggtgtgtcacactctgcctctgaatatttagtgaaagagacattgatgtatgattggtttaaagaaaattttgatgtggatattattttgcttccgcaggagaaatggtggttataaatttttaaagagatagccaatttagctatctctttttactaaacttaaaatttcatgaggcgtttgaaaaatataatcagccacctcgaatcctttccttgttttcgctccccacagggctaaaccaaattttgctcccgcttgttttgcgcattgtaagtcatatactgaatcacctatgtatatcgcttcttgtgcatctatattcaatctttttagacatgtcacaagtggctctggatgtggtttatgttttattgtatcttctacacaaatagagtgttcaaaatatgaatgtaatccaaatggcttgaaatcattgataaactcttggcgtgtttttgaagtaacaatacctgttcgaatcttatatgaagatactatttcaatcacttccgcaattcctttaaatactgtaatttcattcttaaaatctgccatattacgtatccatttctcatgaactgctttcatattttccacaccaatttcttgtaacgcagccataccaggaatacctaatgcaaaatgtagcttttctaatgaataattcatcccttcatctcgcaacgttctctgtaatgaatataaaactgctttttccgtatctaacattgttccgtcaatatcaaatataattcccttcatttttgcgtccccctttacttcactccagtgattagctcaattccatattctttcactactctttctaaattgccgggaataacatcattcgtaataattgtatctattgattctaatgacagtgccttaaagttttgacgttgattcatttttgtctcatcggcaagtaaaaacactccattcgtttgtttaacaatttgacgcttaaaatgaatatcttcctcatacgcataataaacaccatcttctgtaaggccgggtgatccaataaaaactttatcaaaatgataatcttttagtttctccattgcagaaaaacccgccatataacgtgagtgtttatttaattctccacccaaaatatgaatatttacattctccatatccattaaatgatttactgtatcaattgaatttgtaacaaccgttatattacttgctgtcaaaaatgaagccatacagttaacagttgttgaaacatcaagataaataatttcattatctcctacaaaagaagcagcttgctttccaatagatatcttatattcaatttctttttcctcacgatttacataatccgatattttacggtggaaagatgataaagctacaccaccatgagttcgtattattgttgtttcatttgttaactttacaatatctcttcttgctgtatctctggaaacttgaaatagctcacacatcatcttcaaactcatcgtcctatgttcattcaaataatccattatttttattaaacgttcctcttgattcatactctcacccattttcatttacttttaagtacttttaagttattttaagtatatcacaacaaaatctcttaaataaaccttaaaataacttaaaacggaagtgagaaaatgctacgtacaattatttttgattttgatggcacactagctgatactttacctttatgttattactcgtttcaaaacgttttttggcaatttgataataaagaaattactgaagcagagattctttctatgtttggtccaagtgaagttggtattattcatgagaacttactttctgaagaaaaagaagtagcagttgaaagatactatgaatgttatgaagaaaagcatcatgattacgtaaagcgaaatcatgaaatagtagaccttttaatacatttaaaaaaacaagggtttcagttagctatcgtaactggaaaagcaaaaagaagcctggatatttctctaaaagcattaggattagtttctttcttcgactgtatagtagctggagatgatgtaatgaagccaaaacctgaccctgaaggtattcttcttgtattaaatacattaaatgtaaatgcaaacgaagcaatttttattggggatagtgatgctgacatacttgctggaaaacaggcagatgtacgaacgattggcgtacaatggttaccaaactatcaatctgctacatttactgtgcaaccagatgattttattaagaaaacagatgattttctcatctcattaaatactagattttcaaaataagtaatggatattttataactacttattattctgtatttatagaaaaaaattcgatatacaatacactctcaccctatttttgaaatctagacacaaaatacgatccgccacacaaaaatatagaattcataatatatatattaagttatattttaaatactagattttcaaaatatagaaaggagaacgtatatgtaccacttaattgctttagttgcgacggcagacgcaacagcagttctaacggaaacaccagaactatggtattttccattaaaccaacggatagcggagtaggacaaattcaagtatttaatcctactccggcagtaggttccgctactgtaacttggactagtattacaactggaaacccagttgcaagaggagatgctatatccctttatattacccctggaattactgcaagtgctgtatattctatttttctaatcactgacatatagcaattcatttcataaaaaaaagacccgagattcgggtcaacaaatagaaatataaatgaactacaacaaataacagacaaagccattatatatttttcatagtaaaacatccattattttctttttacactatcaatatattatttttcgttatcgtcctcttttttagaacgtctacctaagaagaacacaaaagcattacttccaaataagtgatgttttttctatttaatgcagtggtaacataacctcaaccgttgttccaaccccaacttcactttcaaaactcattttaccattgtggtctttaataattttttctgtaactactaaacctagaccagttcctgtttctttcgttgtataaaaggcttcatttaactttggaattttatcttttggaataccacatccctcatctttcacttgaacgatgattccatcttttacagtaactttaatcgtaatttttcccccaactgacattgcttcaattgcatttttgattaaattaaaaaagacctgttttaatcgtttttcatcacatgtaatggacggtaagtctttactgtaaataccttgtatgtggactccttgttttaaagcaggcttttccataactcgaataacataagagataatttcttgtatgttatgagtttctgattctagtgatttagatttctcaaatccactaagttctgtagcaattatatgaatccgatctacttcttgtttcataatatcactataaattttatcctctggatgcttgtcggcttgtttattcacaagtttttttaagtttgctaaaggtcttctaatcttataaccaataaccgttgccatttttccaacagctgctagtttttctgtctgttttatttctttgtccatcatctcaagcgtacgaacgtaagactgaaccctcaaaaatataatccaacatataatagtaaatacactatataatgccattgggattaaaacgagagaagattgaataatgattcctgtaagagcgtacttcccgacaagtatcgctggaactaaccagaaatatcttttgttcacaaagattggtgcaaacaaaataaaaaatacttctactatatttccaccgtcaaattccgcatcgctaccataataaatcataatgttatggatacaatctaatacattatagccaattagaataatatactttaccacaaaaacattcttccatttcataaagtatattccactgcaaaacaatactaccgtcaaaaagtaaagccataaacctaaaccatcttcaaactttcctacgccttcttgctctcccgcgattaaaggtacgataaattcataggcaagatcatacacaaaaaatataataaaaaataaacttaaaaatactttcaatgcctttatttcttcatttttaaatatatagcctttattcatatggtaactcctagcttttcttccacttggatttcagtatttccacacttccttgggagaatgatgtctattctcgttccagtatctctttcacttgaaatatgcagctcaccaaggtgctcggcgacaattcgattcgctaccgtaagtcccagaccaattttatcttgtttcgttgtataaaaggcttctgtaacacgggttaagttttcttgcttaataccatgaccattatcgattacgctgattattatatattctttccctttattctctaattgcaaatgtaatatgccaccttgttccattgcctctaaagcattttttatcgtatataaaaagactcctcttatttttcgttcatcacattcaacttctattgttttttcttccacattagaaataaactgcacgtttaattcattcatttttccgcgaagacttgttattacttgtaatacaatttttcctacatcatgtttcttataaatagaaggtttgcatgtagcaacttccatcaactcgcttatcatattattcatattttctatttcaaaaatcatacgtttataaataggatcctcttcatgcttctctcgttgtaattgcgtaaatccttttaatgaagccagtggatttttaatttcatgtccaacagtcgctgccatttttccgattactgctaatttttgtgattcactagcaatcgcaatactttcctttacggctgaaagatattgtaaaaatcgatttaaaatgatatatacaactattaacataagtgtacacataataaggaacataaatgcttttatttcctctaatacaaataaataaattaaatattttcctacaatagaggaaagcaaaaacacataaaattttttatttaaaaatatgggtacaaagaaaatgagaataatttctattatatttgtcgcatcaaacgccgccttattataaaaaatatacgaaactatattagcgatttctatccctatgtatgcaaatatccatgcatatttaacaaggtttgccttctcttttttcagtaaatatatattcacgcatagtattgctactccgcaaataacttgccatattatgttgtatcccttatccattattgatttatcttctaatacgattgcatagaaaatttgatatacaataacaatgacatataacacccataaaaggagttttgcattcctttcttcttctttatatgatagaaaactttctttcacttcaacaccccttcaaaataacatctcaaagaataccatttattataataaatgattttcatagacaaacaaagataaatcgaacatttgaggaaaatcgtaccaaaaacgcaatatatttagactatatacagagcataaaatctatgatcattaatacgtatattatggaggatgttttatatagacggcctaaaaagtaaaacaaagcttttagaatggagcctattgatagaacagggggagttttatgtttgttactgtcgagaaagatgtgcatatttttgtgcaagacgttaatcctggtccaggtagtaagactgttttcttcgttcacggatggcctttaaatcatcaaatgtatcaatatcaactcaatgttttaccagagcatggctttcgttgtatcgccatggatatacgagggaatgggcaatctgataagccatggactggttacacgtatgatcgattagccgatgatatcgcaattgttctagaagcactccaagtagagaacgctacattagtcggtttctcagttggtggtgctctttctattcgctatatgtctcgctatcatgggcgccgcatttctaagctcgcattaattgacgctgtctccccctctttcgttaaaaatcaagagtccccttacggtgtaccgaaagaacaagcagatgctctcattaatcaaatgtatgctaatttaccaaaatttttaaatgacgtatctttatcctttttcaatagaaacttaggggctgcaacccttgaatggttttcttatctcggtatgcagtccgcttcttatgcccttatcaaaattttacaagcagctgcaaatgaagatgtaacgaaagatttaaataaaattaacgtcccaacaaaaatcttccacggcgttcacgaccaactaattccttacaaaagtgctgagcttacgcaacaacgaattaaaaattctcagttacatgctcttacaaatagtggtcatggttcaccaatcgatcaagcggatgaattaaataaagaactgataaaatttttacatgcataacaactgcaatacaagaacgaaagttaatataatagatttttcacaaaacataaaattcacatatttctcacaaatacacaaataaaacgattacattttcatatatactaaatgtacaggtaatactccctaaacccagcttgtctggttaccccgttaaatactatgaaaaaagaacttgtatcgttatacaagttctttttgtttcttttatttaaagaggatatctgtactatattgatttccaacgagtaaatcatattggagcattttatattgctctaacatttctttttgtttctttgttaaatcattgattacttctccatttttatcaacttttaattcatctctaagcactggtatttccttgtaaagttccgataaaaattgataaaataaggatttatttaatcctgcataatcaaaaataagattagaaaaatgaattgggcttactaaacctaaattatcatttggcatatcaaagtttgcatacattaatagcggcgtttgcgccatcgctaaacgttcactcggtgttttttcattcgttatatacccgttttctttataaaaagatttatttgttcctagtgatggaagatgatctccaaagaatactaataatgtaggtctatctaaattatctagttgctctattaaatattgaagtgcctcatctgaacgtcttaacccttctgtatacgtctctaattctccctttgattcttcattttctagcccgctaatttctattaggttttcaccaaatcggccctctgtaaatggaaaatgattttgcatcgtaactgcatgaataaatgtaggctgtttttgttcctctaactcagcaattatctctttactcatcgctaaatcactaatataatctccatcaatatccacatttttcatcgtgtcctctgcattaaacttatcaaatcctaacaccttatatacatcatcacgtttaaagaatgtgcgaccaaatgaatgaattgcacttgtgtaatacccttcttttttcaacgccgtagggattgatggaatttctttcttatttgtaataacctgctgatatggtatagaacctggctttaacaaactcattgaataacttgttaatgcctcaaattcaacgttcgccgtatttcccccaaatgtaggagaaatagtttgtcccccaggaaagttttctatataatgatgtaaatttggtacaggatcttcactaaaagaaaggttggttactttcgtcggatcccaaaacgattcactcattacaaaaataatattcggtttctcttttttcttttgactccctatatttccactatattgtttttttatatcgtttgctatttgaagcatattttctttagaataattttttggtttttccataactgttgtatctaaattgctaataaacccaagtataaaaccatttgaagcgtagttctcattttgattccacaaaacaaaatctacacctgatttttgaaatactttattcataaatgtattcgcaaaattgccatacgcatatagaacaaaaatagatcctactactaataaggctcttattcctagatgaatctttacattttgaatataccttctcatatatatccctgctacaatacaagctacgatacttaagataatgacaaaaatataactccaactaaaatagtccatcaccatcggtataacagattgcatatgagtaatttgtgtgaaatcagaaggatataacggatcacctctaaaaataagcttcaaataattcacaatacataaaatgactaacgtacagctcgttaaaaccatacttagaaaaaccttacctattaaattatatacaagaatatatatcgcataaattactacaaaacttaatataaactgcatattataaaagtaaatccaattcattgcctctatgaaactcatattaacttgcatgacaatataaaataacgctactgtatgagctaataaaagtaatataaaatgcactcgcagggatgctctaagtatagacatctcttttttaatgaaatgcgtaatataaaacgttatgccccatatgaacatcatcataacacttaaaacaagcttttgatttaaatgatctttcatcatgtctaaattaaaaacctttaaaatcataaacagcatagttattactaataaagtcaccatactacttataatgctagaaattaatatatttctttttggaagatgaaaaagtgtagaaccatacttcaattcattccctcgtttctatgtcttaatttccccgcatcgaaagaactatttctattaaaataacatatattacatatttcgtcagcatacttgcttctaccataaatgtattgtcttaatcttcccttaatcaacagttaaattgtggtatacaaattactcattcttgaaaaacttaatttcagcattccactttatgatataataactatgttttggaaatccttaatactattaaagatttcacataaaattacgaaagaattaataaaaaaggagttgctcatttttgcttactaagtttaagagtttgcctaaagcggtatatgcaattttggcgctttctttcctgttgcacgttttttgtttagtaaaacagccaggattagatggagagttagtcaaagtaacatatggtgcaaatgatgcctttaactattcgttaacagctgaacaactattaaaacatggtgtatttggttatgtgtatttagaacctagtgaagttccagggaaaaatgcatatattacaccaggtcagccattactattagctggcgctatgattatttctgatattacatcaattccttactattacgtagcaactgttattaacatgatcatgaacctttgcacagtgctattagtattcttaataggaaaagaattgttcgaaaaaaacatttatggaattgttgcaagtattttatatgctatttatccaagtaactatacatacttccgtacattgctaacagaagttccatccatattcttattggcgttatgtgtatatgtatttgttctcgcatggaaatacaataaagtgaaattccatatatggtttggaattgtcgtttcaattttacttatgttccgtccaaatccagctccaatgatgctcattcctgttcttgttgtgttatttacatatggatttaaagaatccattcgaatcggattgttatggtttatcggacctttctttattattggcgcatgggttgttcgtaactacttagcactcaaccaatttattttattctcaacccaaggtgcagatccactaattgccggtgcagatccatttaataaaattggatatgaaaatatagtaaatgaaatgagagctaaaggcttagatgacaaaggtgcatacgcaaaagaattaattaagaacggatttaagacggacttcacttattggttctcttggttcactgtcggtaaaacaattgaattattcaaaacagctcctgctgtagaccaatatcgtattcacaactttatgcaactatgtcatagagtgtttatcatcggtacattcttgagcagcttctgcttcatgctaaattcatttaaacataaacgcgttatgatgctagtagcaagttcaattatttacattatcttctcaaacttattcttagcaattaatcgctatggatttttcattaatcctcttatgtgcttaattcttgcatacggattaattcacattgtgcagaagcttccattcttccgcactaatcaagcataataagaaagaggtcgtccaccgttggacgacctctttcttattcccccacactttacacacggccaatttgtccattctgtaatcacactttaattccgtatgtatgtgtgtctgtatttgtcaaaatatctttcacaacaccactcactgttttacgtataaatgcaagttttttacaactattactataacgaaaagagaaaatgattagtatgtgtattatataaaagggagcagccatattttccatacgatacatacgagcactataactacaaaatcaaaaaaatctaatctcggtccttttttcatattcatatgtagccacatatgaaaccattttatttttgtatatttatggatgtttttctttgcaaatcggtaaataagcatttgcataataaaaaatccggccacaaaaataaataataagatgagaaatccaatcacaaaattcctcctatttttgtagcgttttttctactatccgatttttcaaaacccactcttcaaactgggcacttccaaattcccaactaagatcgcgagcatgtacagaaaaaacgtaataaccggcatattcgtccataaacctacctaactctacatcgtctttctgaataccgtatactccaaaattaaaatacacatcccatacgtcttcattcttcctcttataagcgatcgattccatatcacattctgtcccgaaataatcaagatgtaaatgtacgctatcatcgtattcgtactccattttatcaccccttatatttgtacttctttaccacccaaaaaattcctgctatctacactcacatatgggcacttacctacatatcatgcttgtagagtgacttctaggaggtgttatatagtgaaaaaattaatcgcgattttttgcatcatgttactagctgtttttacttttgctgcttgtagtagtaaaaaagaaagtacgaaagaacaaactcaaaacattcgcgttggcgaagttacccattctctcttctatgccccattatatgtcgggattgaaaaaggattttttaaagatgaaggactaaatattgacctacaaacaacagctggtggcgataaaacgatgaccgccctattatctggcggaattgatattgctctcgtcggttctgaaacgtctatttacgttcatcaacaaggagcgaaagaccctgtcattaactttgcacagcttacacaaacagatgggacatttttagtttcacgtaaaaaactagactcttttaattggaatgacgtaaaaggtgttacatttttaggacagcgtaaaggcggcatgccgcaaatggttggggaatacgttttaaagaaaaatggcattgatcctcggaaagatacgaacttaattcaaaatatcgaatttgctaatattgcaaatgcctttgcatctggtacaggagagtttgtgcagctctttgaaccgactgcaagcatattcgaaaaagaaggtaaaggttatatcgtcgcttcattcggaaatgaatctggtactgttccttatacaacgttcatggcaaaagaaagtttcttaaagaaagataaagctgctgctgaaaagttcacacgtgcgctctataaagcacagcaatgggttgatacacatagtccagaagagattgctgatgctgtttctccgctatttaaagacacttcgaaagacattacagtaaaagtaattgaacggtataaaaaacaacattcttatgcgacaaatccactactagatgcggaagaatggaaacagctccaaacgattatgaaagatgctggtgaattacaaaaagaagtcccacatgaagcgctcgtcaatacaaaaattgccgaaagcgttattaagaaatagaggcgaagtgtatgagttttttacaaatacgtaacgtttctcactgttttttcgcaaaagagaatgccaaacttattctcgaagatatgagcttacaagtggaagaaggcgaatttatttctatactcggcccaagtggttgcggtaaaacaacgctcctctcaatcattgctggactacttgatccaattgatggtatcgtctttttagatggtgaaccaattacaacgaaaacttcatctatgggatatatgttgcagcaagattacttattcccgtggaaaacaattgaagaaaatattatgcttggacttcatattcgaaagatttatgatgaacagatgaaagaacatactttaaatcttttaaaacaagtcggtctacatggggtagaaggacaatatcctcgtgaactatccggcggtatgcgtcaacgtgctgctctcgttcgaacgttagcaactgatccgaaaattttattactagatgaaccattctccgcactcgattatcaaacgaaattaaaactagaagaactcgttttcaacttactaaataaatataagaaaacatcactacttgttactcacgatattgaagaggcgattgcgatgagtgatcgtatttatttactgcaagcgaatcctggaaaaatcgcaaaaacctttatcgtcccggaaagtatccgttctttatcaccgttagaagcacgccatcactacgatttcccagccctctttcaagatatatggaaggagctggaacgacttggataatataaaacaactacatgaacaatttcgaaagaaagaacgcaggcgtgcttggattgctcgctcattacagcttttactacttattcttttctttgcactatgggaaatagctagcaaaaaagaatggatcgatcctttactctttagttctccttcgagtatttgggatctcttcttaacgaaatggatcgacggttcactttgggtccacatatggacgacattgctggaaacaggagtaggcttcattctcggaacggtactcggtgctattattgccacatttctttggtggatgccacttctagcccgcgtacttgatccttacctcgtcgtcctaaatgcaatgccaaaagttgcactcggtccaatcatcatcgttattttcggtccaaacatttcatcttctatcgcaatgggagtaatcatttccatcatcattaccattctcgttatttacagtgcatttcaagaagtcgattctaactatataaaagtgatggacacatttggcgcaaataaatggcaatgttataagcaagtcgttctccctgcatcctttccagcaattatctcaacgttaaaagtaaatgttggtttatcctgggtcggtgttattttcggagaacttctcgtttccaaacaaggacttggctacttaattagctacggattccaagtctttaacttcacactcgtcttacttagcgtactactcacatgtgttcttgcaactcttatgtatgtatttgttgaggcatttgaaaaaattctaattggaaaaagaaaaagaagctgactcaaaacagtgcgctatagtcagcttctttcttttaccttttatcacacattttcgtttcatttgtaatgtttccatccgcaaccgtaactgtatggaaacagtctttcacacgtactgtaacgacattatcttttcgatctatcacatgataatcattaaacttttcattcaaagcactacgaatttgctccccttcaaaaatcggaaaaccgtgagacattacccaaatgagaccagcaacagcaagaatcgttttcatacgtttcattacctcctcgagagtaaacttatagtccctacaacacgcgcattataattgtgtctaaattgtgacatttttatactaattctattttataccgaaagttccttcttctttttaataaaaatacagaattttcaattttatcaacataaaaaaacgcaaagaattaaaaattcttcacgcttttctttaacgaaactatatcgaaagcatacctcacattagtctccactttgttgttctatcgtttttgaaacatcatataatcccgacagcacttccgctctcatttttacaagctcagggaactgatagaagaaagcaatttttttatattttaactctgttccttctttcaccttttttgaatcttgtaaaatgaacgctgtaaatgtatctgcgatatcctccgttacatttgttattccatacagcgatacaaaatcatcatgcttttctttataaaattcaatttgtgcctcttcactttcttctactttcttttctgtccactcttgctcaattggtttccaaaattcattataaaattggttaatatacgaagtttttctcgcacatccatttttcaagaacaccgttttacatttatttcgatatgatgaaatgtctttctcttcatcaaacgcctctaaatatttcctatccactggtacttgtttatgcccaatcgttaatacgtgagccgtttcatgaattaatgttttcatcacttcatctatattcaccccagaatcgagcacgtctaaactaagcaaccaatctctcgggtcatccatacttggcatgacatgggcaacaacgccgtcataaccatccgttattaaatccaaccctgttatattctcacgatatttcactggaatgagagtgcggtacatgtcccataacgtttcatgatactctctatcttgccgctggcttaacaaatcatcttttgctactttgtcatctgcaaaaactttattcaatctcttacgatccaatttctcaaaataaggatctacaatttcatcatcatcgatataataagaagctaaaaagaagtaattgtcatcctcttcttttttctgttccgcctctttcatattcatactttcatactcttctatgtcataatcctctactttttcaagttctgaaagtccctctatctttttatatactttttgtaatgttttatctcctatttgcgtgcactcttcttctgttttacaaatttctttttctttcgtaacctcgatagcactctcgcatcctgcaactaaactgcttgctataatacaacacactaacttgccatacagtttcttcatacaatcccccattattccattctacaaaatatcataatcatttttttacgaatatgcgataattaattataaaaactgcaaggaggcttcccatgattcgtgcaatcttattcgacttagatggaacactattagatcggcgccaatctttagaacaatttatttgtgagcaatataatcgcttcgcctcacatttgaagagcatagagaaatcaaagtattgttctcgatttcttgaactcgataataatggctatacgtggaaggataaagtatatgctactctcctttccgaatacaacattactactttaacgcaagaacaactactacacgactatattacaaacttccaacatcattgtattcctttcaaaaacacgcatgaactacttcaacagttaaaacagcgaaacattaaaattggtattattacaaatggttttactgaatttcagatgagcaaccttcgagcactacatatacatacgtatacaaacaccattctcgtttcagaagctgaaggaattaaaaaacctcatcctgaaattttcgaacgtgctttgcaaagactagatgtgaaggcagaagaatgtctttatgttggagatcatccagaaaacgatgtgcttggttctgaacaagtagggattcttggtgtttggaaaaaagattcgttttgggggaattttaagcattcacgtatcgtagatgatttgttggaggtgctttcgtttttagaggtggagataaagtgaaactttaatccgcccccacccgaaagaaatatatgcaaataaccaattccaaacgacaaagcaattattataaaaaataaagaaaagtttaatttaaccatcgaaacagtaacagtcgtttcttttcttttatccatctttcccctcctaaaatgtaaatatatctttacaaaattgtataatatacccaaaataatataaagatatatttacatttattcttacatacaaaaaaaagaaaccggctactttacttcgtaaaacagccgatttcttctatatgtttcatcgtacgcgctaatacgtcatcgcgcattataaagctaaattttctattcgttttaatgttgtcaggaatgtcttttaataaaacagaccctttcgtttcttcgtaatgcgtatgttcttctaccgcactaattgttgcaaaataaatgtttttaatgattattttgtcttttccagatactttgtattgtcctaagtaagttaaatcagaaactatgccgccggtttcttcatgaacctctcgaactgccgcttcttccggtgtttcccctagttctactttaccacctggaaattcaagaccgcgacgtaaatgatgcgttaataaccattgatccccgtaccggcatacaacccaaacatgctttggctcaggagaaaatggataacgttcaaacgataattgtacagtgttgtggtaataatctttaaatttgtacatgccattactcccctattgatggttacaagtttttcctaccacaaattgtagcatattctcgcttttctgcataatattatccaattacaatccattgattattcccatttgcgcgactaattctttcgtctcatgatttcctaaatcgtaaatcattttatatgctttttgtagttgttcatcatatcggtcattatttgaatcgtgatgatactcaacaaatggaacgtgggagcgtacaaatgaccctaaatcttctacatatgcttgatcaaagtgctctcttaattccgtaatttcctcatcatttgcggaaatctcaaaattatacgtatccgccgtcttcacttgtgaaatttgaccatttcctattgatatataatatgtttttttcgtctccatgtaacacccttctttcatccttttattttctattgttttcatcaattacaaaattatgtaaaataaagaaaaggagggattttatgttcaaaatattaattatcggtattatcatcgtcctaatcatcctcgtactctccatcatgacaattaataaaggctatgcttataaacattccgtcgataaactagaagacaatccttatacaaaaaagaataaggagaattcctaatatgcttcgtatacttcgcatcatagtagcactcactgtgatcgttatgtcggcaattggattatatacaggtcaaaataattttttacctctttcacaatttctattaggggctttaatgtttctcatcgcatttgaacaaataaagaaaaaggaattagcaactggatttatttgtattattgccggtgctttcatttggatagttctcattattacctacataaaatagaggaggtcttttatgctaaaagggggtcggattactttatcacttattgccttatctatagcaatctatggattttttactggtagtagagaaataatgccttatatgttcatctttttaggaggtatggccctcaccataagtttagaggaaatattaaaacgacaaacaggaggtagtctgctcgctctactagcaggggccgctgctttatttattggtttcacagaaatattctagtaaatggtctaaaggaggctatacaatgctaactctaactatattacggagttttttagcatttctcatgcttctcttactcattctaagcacttatatccatgttaccgataatttttcacttctcccatacgtacaatttattctcagttgtttctttattcttctaggaattaatgaattgaaatccggacgaaaatcaatgagtatcccgtattttttcgtttccagtctcatattcttctttttaatatcaaactactttcgttatatgtagaatgaaattttgaccaatttagcatttataattattttctctcagtaactatttctttctacttaagggggattccatgttaaaaaacattcaaattataatcgccactatcgctctttctctcgccctatttagcttctttgcaaacttcactattcttttaccttacgtgtctatccttttaagtattatgtgtatcctttttggaatcgatgaaataaagaagcagcaaaaagcgaaagcatttgtttattttctctgttctgcctttattttatatgttggagtatctaatatattttcatacaaaagaagagtatagtcgctcttagcacaataaaaaaactgccctttcacaggcagtttttctttttatccaaaaactttctcaagttcatctttatcttggcttaaccagaagttcattaagcgttgtgctccttctaagtcgtgaagcttcgcttgaccacattgcgtttcatttgcagccggaatttctgtaatttgaaccgcatcttttaatgttagttctaataaatcaatgatttctcgtactgtcggtgttccgcttactacaagataatatcctgtttggcagcccatcggtgaaatatcgataatatcaaagtgcggataacgatcaatatatttacgtaaattaaatgctaataaatgctctaacgtatgaataacatctggtttcattgcttgtttattcggttggcagaaacgaatatcgaatttatttacaataccgtcactacctacattgtgaactccgcaatgtcttacataaggtgcctttacaatcgtatgatctaattcaaagctttctactgatggcatacaacatctctcccgcttttaatttaattccgttatatccaatatgatataacggaaatgcacattagtaaagtattatgtacagtcgtgctataatactttaagaatatgctgaaaaggagaccgttatgaaacagatttttattgggattatacgcttttatcaaaagttcatttctccgatgacaccaccaacatgccgtttttatccaacttgttctcattatggattagaagcgtttcaaaaacatggtgcattcaaaggcttttggcttacttgtaagcgtatattaaaatgtcaccctttccacccgggaggatttgatcctgtcccagataaaaaggatgacaaagtaaattcttaattgtcgtaaccattcacaactaaatctaattttcctgtatcaggatctataacaagaccgtgaacaggtacttcttccggaagtaatgggtggttgcgaagtactgatacgctatgttctacactttcttccacactagagaaaccgcgcaagaattgttctaaatcgattccagaataacgaagcatatctaatttctcttctgttataccgcgttctttcattctctcaatcgtactacttgcttgaatttttgccataccacaatcatggtgaccaactacacatacttcatcagcgccaagttcgtatacagcgactaaaatactacgcataatacttccaaatggatgtgaaataacagcgcctgctactttaataattttcacatcaccgttacgcatattcatcgcttttggtaatagttcaacaagtcgtgtatccatacaagaaataattaccatttttttgtttggaaatttccccgctacaaactcttcatattttttctcttcaacaaatttctcattgtactgcaaaatctcttctaatgacttcatagtaaaggaccctcttttctctcgtttacactacataaatagtgtaccaaaatatgaaaaactcaaaaaggatatcgctttatagtaaaaataagatattttcagataatcgacataattctttcaaaatatacacacatctttgtaacaagtttcacatactttaaacgtattttcactataaactgattgtagataatgtaaaaaaggagtgaatatttattatgtccgacgttctgttactgagtcgttttcaatttgcaattactattttttatcactttttatttgtacctttgacaatcggacttgtcattttagtagcatgtatggaaactcaatacgcccgcacattgaatccaacataccgtaaaatggcaaatttctggggtaaattatttacaattaacttcgtaatggggattataaccgggattacgatggaattccaatttggaacaaactggtctgagtactccaaatatatgggagacattttcggatcccctctcgcaatcgaagcactcgttgccttcttcttagaatctactttcatgggaatatggttattcggtaaagacaaaatttcaccaaagttccgtgccttctgtatgtggatggttgcacttggaacaaacatttccgccctttggattattacagcaaacggctttatgcaaaaccctgttggatacgtcgtgcgtaacggccgcgctgaattaaatgatttctgggcactcgttacgaatccatacgcttggaacatgttcttccatactgtagttggttgttatatcgtaggtgctttcttcgttatggcaattagtgcttatcacttattacgtaaaaatgaagtagaattcttcaaaaaatcatttaagtttggtttaatgttaggcttattcgccgcaacaattacaccgtttatgggacatcaatctggtgtatcagcagctaaatatcaacccgcaaaaggtgctgcgatggaagcagtttgggaaactggaaaaggacaaggcttctcaattgttcaaattcctgatgtaaaaaatgagaagaactttgaattccttacgattccaaaactcggaagcttcttctacacaaattcatttaatggcgaaattgttggtttaaaagatattccgaaagatgaacgtccaaatgttaacctcgtgtattatagcttccgcttaatggttgcactcggcatgttctttatggcattaacttggtatggcttctatttaaaccgaaaaggaaaactagaaaactcaaaacgttatttgaaaattacaatatggtctgtcttacttccttatatcgcaattaacgcaggatggattgtcgctgaagtaggtcgtcaaccatggacagtatataaactaatgcgtacagcagaatctgtatcacctatatctgtcccgcaaatttggttctcattaattagtttaattttattctacactttacttttaatcgcagacgtatacttaatgctgaagttcgcgaaaaaaggacctgccgcattagaagaacctgctactgagggaggtgtagctcatgtctcatgatatgcttgcaatcatctggttcggtttatggggcgtgatttggacagtttacttcattcttgacgggtatgcacttggtaacggaatgatttttcctttcgttacgaaagatcgacaagaacgaaatcaattacaagaagcaattggcccgttctggggcggtaatgaagtatggttaattacagctggtggcgcaacatttgctgccttcccagtcacatatgctaatatgtttagttatttatatacaccgttattcttagtattacttgcactatttgctcgtgccgctggactggaattcatgcataaagatgattcaccaatttggcaaaaaacttgtaaatgggcatttgcaattggcagtttcctaatcgccttcttattcggtgttacattcgctaatctttattacggactacaaatcggaaaaaatggctatgaaggaaatttacttagcttactaaaccattacggtatattaggtggtcttttcttcactgctatatttgtcgtatccggtgccctttgggtcatgattaaaacgactggtgaagtatctgatcgtgcttataaaatcgcaagaccattttcaatggcagctgctattattttagctatcttctatgtagcaactgctaatcggacaaacttattccaaaactttacggaatatccggtactattcattcttccagtacttgcaatgctaatgagtgtactcgcacttattatggtgtacaaacataaaattggccttgcattcacattcgtttgcctaacaatcgcaatgtttatgacaactggctttgcaggtatgttcccaagaatgttaccatctcgtattaacgatgcatacagtacaacgttatataacgcagctggtagtcaattaaacttaaaaattatgttcttcgttgcaatggttatggtaccaatcgttattggatatcagctttggagctacagtatttttaaaaataaaattcataaagactctgctaaagggtatcactaaagtaaaaaaagacacttcgtttgaagtgtctttttttgtacgtatgattttcgataagatgttatatttctaatctaacaactataatacagaagaatcattaacagctcacagctagagtgtaacatacaacaaacatgttactttatgcaattttgcattttaaaattataacgttgattgaataacttgatcatacgcatcattatcccttacatccgccgtactaatcccgctaaacgtttgtactttcattcctgtatttgatgatcccgatccattataagctttcgtcttttcaatcggctgtacgttatatttatcccctacattaattgttccattgcagttttcaataataacaccttccacaactgccggcattttgtcacccactttcatttctttacttttattttatgaaaatcgcctagaaaaatagcatgtttcaataagaaaaagcactcaatttgagtgctttttctttaagcataaagacaagtttggagacagttgacttcttcaaaattttattaggggtaatattttgaaaaagaaagcctttcatatgtaggttaacaccactggaatatatagtaaattgataatatttatacggaagattgctaatgtttagtatagatagtttacactatgctaacagtgaaaactatctatactaataaaaaaaggtgccttcaaaaaagacacctttcaaaaacagacactataaaacagaattatttattgttatacgattgttagatacaaaaagtagagggaaatgtttgtattaaattctgctttataaagtctgtctacaaattatattgtaatcctcttcatttgaaaaaaaatataatatgcacaattgcatacaaaaagaaaaagcactctattgagtgccttttcaaccattttacttttaatatatcgctttgaatatattgtaacatatgtatccatatattttattgagaaaattcaaaatcctttttctttcattttcacttataaaatcatgtaatataaaaggtatgtcaaattcttatacaaattgaggtgtactatatttatgatgtatttcggaattattcctcttatattatttattatttttcttatctcatatttaaaagatccgcgaaaaataataaacggctttttatttaattcctttgtctgttttttccttcttttttgtgtgattatatctgtaaattcaagtagtgatgtcctacgctatattataattttacctattttagcacttcttattatgcttcctttcggtattgttgctttaatgtttgggctatttcttaatgctagaattttaatgaagcgagaaggaagacggttcactaactgtttaacactccttgctgctttagggatgttattctttatgttactccctattataaacccagcaagtttggtctcatcgcatttagagcctatttttgcagctatttctcttataagcttctatttctttatacacttatctaacttcttaagcgcatattttttataccaattcaacagaccaagacgtaatcaagatttcattatcgttcttggtagcggcttaattaatgataaagtaccaccattacttgcaagccgcattaataaagctatcgacttctattggaaacaagcagctgtaaatacaccaccaacaattattttctctggtggtcaaggtccagatgaaggtcttccagaggcagaagcaatgcaaaattatgctgttgaaaaaggaattcctcttgaacatacggtgcaagaaaatcgctctgtaaacacatatcaaaatatgttgttctctaaagaaattatggattctttaaaacctgaaggtaaatataaaagtatttttaccacaaataatttccaccttttccgcgctggcatatacgctagacaagctggtcttaatagccaaggaatcgggtcaaaaactgcattttattactggcctaacgcaatgattcgcgaatatgttgcgattgtcgtaatgggacgtaagcgccatatgaaaatatgtggaactattttaggtttcgctttattcgtatcagtacttagttttatattttcttaatagcatcccatcctttgaaaggatgggatttcttatactgatttcaaaaatattttaaagataatatggtgataatattccctgcatacatccattaaaggagaattttttcaaattaaatgttaaaataaaatttaggtgtgaattacgtaacaaataagaaactagtttgaaacgaggaaattatatggagaaaattatcaaaaacaagcccaataagctaaaaattgcttcaaaagctttgatgattattattggggcatttatcacagcgtacggattagaagcagtattaattccaaataacgtatcagacggtggtgtgactggtttaagtatcgttagttcaagattatttggattgccattaggagctctaatcgcagttattaacattcctttcgtttggttagggtataagcaaatcggtaaaagctttgcgatttattctattatcggaattgcttcattagcagtaggtaccgttgtcatgcacggaataccagctattattgaaggcgatacattattagttacagttgttggtggtattatcatcggttttggtatgggactagcattacgtaacggtggggcattagatgggatcgatatgcttgctgtattgctttctcgtaagttaccatttggaacgagtgaccttattttattcttaaacatgttcgtatttattttcgtatcaacggtattcggtcttcaaggagctatcctttcggcaattgcttactttatcgcttcgaaagtgattcatatcgttgaagttggtttaagtggttcaaaagcatttaaaattattacaaaagagcctgaattaatggtagaaacaattcgcgatcgtttaggccgaagtgcaacatataacgaagtatacggtggttattcaagagagaaattcaaagaaatttcttgcgtaattaaccgtttagaagaaagtaaaatgaaagaacttattaatgaaatcgatccacacgcctttattacagtttatgacgtagcagaagtaaaaggcggtaatttcaagaaacgtgatattcattaatcgttatataaaagagggtgtgccaaaattttggcacaccctctttttattattaagttgctatcgttgtcagtttttgtcggtaagtcgatatatttcaataatcgctgatatattttgagttgtggtcgatatattctaataatcgctgatatatttttactcgcccccttatgcctaaatcgtaccaactgaaagggattaattcccataacacgaaaaaagaccaaaaagcaaattccactttttggcctctacactatcttctcttcgtaatctttcctgaaccaccgaccctcgttttcggaggagatgtattccttggcggcgttttaatagatgattttggcttcacatctgatccgcttgaaccgcctggtgttttcgtaattttccccttgcttccagtagaaggtgggggcgtcgtattacttcctttttcagtaatacttcccttatcacctactgatggtttcgaatctacattatcgcctcgcttaatgatagaccctttcccttccttcgtaattggaggtggggttttcttttcttcttttgtaggtggtctttctggaataactggttgatgattttgtctgtcattatatcctcggtaatcaccggatgatgatctttttgaaccgaatatatcgtttaatatgctacccataatatatccttgcaagaaggacggttggtaattttgacggacaaattctttattacttatttcaattaacgtatcagatggtttctctttatccttttgcaggttataaatcttatcagaataaacgaggaacatttgattttcgtcttctttagatgcttgcttcggttctctttcgttaatgagttccttcgctacttcaggaactgaccgattggcggccctatacacgtaagattcttgtttaccttccttggcaacagattcaagtggataacggtcttgaatcgactttgtctgcccgccttgacaacctgataaggcataaccagcaacaacaagtaatataacgatagcaagtatagggattacaaacgatttaatcatggtaaacaatcggtttgacatgattacgcccccttacgttgctcttataatttgtacatcagcaggaatgattgcttctccctcatacatcattgtgcgaccattttgccattcaatacgcaataattttcgattgtctgattggaattcccatacgtactgttcttctgaagctgagaatggagtttttcccatcacaacaacacgtccgttatattgttcttccatatggtactcggtatcatccatttcaattgtcgtcggaatttcatcaattgaatctaagcgaccatcaattggtgtatataatttgtaatacgtattttcacgatcttcaatttttaaataacgaatgtcttttccatcttgcaatgtcaaaacaatttccttacgcgaatgcatactcgttttcccaattaattcatacataactaatgacacttcaatcatatcgccaggagctaacgttaaaagactcttttccggcttcggtggctctgggcttttcattatatttttaattcgtttaaataaactcatgatttacccctccttttctctttataaacaagcacctaaaataagtgcaccaacaatatgtaatgatccagctaacatcgcatgtgcaacgctgccttctttcgtaccttcttctaaatcaagaccagacattttctttaatacgaattcgataaacatttctaccactaataaaataacgaaagaaactgctgatgcaagaagtgcttgccataagtcatttgctttcgtaattgattgagataaaatgtacccttgtgcaaataatttcataataaaacgagttgttacagctgtatttccatttttgatttcttttaaatcattgtattttgtaaaaattgaatcaacccacataattgcaaataaaagtactgcactcgctccagtccatacaagcatggctaatacatttgtccatgtcattgcaaaacctcctctaaatataatagaaaaccgacatgaatatatttagacatgtcggttcatttgtctctattctatattatttctcatactgcttcataatacgagctaattcatcgtcaacagcagaatttttgtttaagcttgcgaattcatcatctaatgatttttctttcttataaacttcaccgctcgcttctgcttcagcctctaattgaagagctttctcttccatacggcttaaaccagcttttgctgagtttgaatcaaatccagacatcgcctgattaatattcttttgtgctttcgccgcatttacacgcgctacaagtgtctcacgtttatttttcagctcatttaattgcttacgcatttcttctagctttaggcgcaggttatcagcagcagctttattttgctcatagcttgctttatactcattcatcttttgctccgcattttgtttttcttctagtgcacggcgcgcaagatctaagttattagcttgaacagccatatgagcttgctcttcacgttttttcacaagtgcttcttgctcttcaaataatattttgaatttcttctcaagcgcgatttgagctgctacacttttctcagcttcttgtacatccgcttgcatatcgcgtaaatattgatccgtcatcttaactggatcttccgctttctcaattaacgaatacacatttgacattgttaaatctcttaatcgtttaaatacagacatctaaattcctcctatgatatacctcatatttcaaattcactacttggaaaactgaaaaatctccctttacagtaaagaatattcatttttacagcctatgtgtttattataacaaaactaatatgtccttacatgttatttccaaaatacatccattataatatgacattctatatacaatattgtatttctaatatattctcattattcctctttgaaattaacttacttttgtgcaatttcactaaattacataagtgtaatgttactgtaagctaactcgatagttgcattctaatatttcttatacactaataccagaagcaacaaacaagcttcttcacttgtaagcaataatacaaaaattgtatttaatataaaacatataaaaggagaaatcatcatgaaaaaattagtaggaatcggattagcagcagcaatttcacttggagcattatcaggttgttctttattaggagagaaagcgaacggttttgtactgtacggctcagaagaacaagttcagcaaattacagataaaaacaaaaaagaagtgaaagaaaaagacttctataaaatgaaaatgacaacattagatggtaaaaaagttcttgtaatggataagaaaactggtgaggaactagtgaaaaaagagttacttagcaaagttgatgaaaaagacaacacgaaaccacttgataaattaccagctataacaacagaacaaggtgtattatttgcaaaagaaaaagtaaaaaatgctacacttgatggagcgaaattaaaatatgaaggcaacacaattatcggaagtggccgtgcatatacagatatgtatgcgattgtcgatgacgcaacttacaacaatgtaaaaggtgatgaaaaatctgtaggtgtattaaaatttgataaagacccaagtaaagaattccctggttacaacggcgtcgaagcttctcaacttgtaaaaattaaaaagtaaaacaaaaaagctttgcgacattcgcaaagcttttttctatttattatgagcaacttgttccatatctggactacaagttttcgactgacatgacttatttaaagaacatgctgcgcattttccctttttacttctctttacaaaattaactaacgtgtatgctgcataaccaaaaatgatagctccaattataatattgaccatcatcgtaatacatctccttctagaatccgagtaaggatccaacttgatatataatgagcgttaatacataagcaactacgagtggataaacgactgagaaaatcgtccatttcgctgatcctgtttcacgtttaataacagctaccgtcgctaaacacggaacatataataaaataaagaacataaatgcataagctgataatgctgtataatgtactcccattacatttccaagcacatcttctttaactgcataaataattgccattgtagaaacgacaacttccttcgctaaaaatcctgttaaaagggatgctgcagcttgccacgttccaaagccgagcggtgcgaatagcggtgcgataaatccaccaatcatcgctaagtaactgtctcccatatcaacaccaaatcctgatggacctgcatagtttaataaccaaatgacaaccgaaccaccaaagatgaatgtaccagctttacgaacaaatccttttcctttctcccacgtgctcagccataatgttttcgcttgtggcacacggtaaggcggtaattcaattacgaaaatagacttttccgctttcaaaatcgtaagagacataatttttgtaactaataacgcaagaacaatccctgcaacatataaagaaaatacaacagtcgcctgactatgcgggaagaatacgcccgcaaataatgcatatacaggtaatcgtgctgaacaagacataaatggtgttactaaaatggtaagtaaacgttctttctcctgttcaatcgttctcgcagccataatacctggaacgttacatccaaaaccgataatcatcggaataaaagcttttccgtttaagccgaaaaactccataattctatccataacaactgcaattcgcgccatataccctgagtcttctaataatgaaatgaaaaagaatagtgcaaagatttgtggtacgaatactaatacagcaccaacaccggcaataataccttctgtaacgagtgcttgaataaaatgagaagctccaatacttgtaagtccagccgtcacccaatccgtaagctggccaccaaaaaactcatctaacatatcagataaaggtgtaccaatccacgtaaacgtaacctgaaaaataaaaaacataactgctaaaaagattggaagtcctaaaattttatgtgtaattaatctatcaattttttctgaaaaaggaatttttccttctttctcatgcttcataacatttgtttttaacttttcaatatacgcttcacgagttttgtaaatgtgctcttctaacgtacaatcaagttttccttctaagcgagatcgaatggctatgagttccttataaattggtaatgctttcatttctttttctactacttcgttattgcttaaaaattgaagtgctaaccatctcggatgctcgtaattcactgtctctaaaagagcaattacttctccaattccttcatccatttgtacaccatatgaaataaggaatggctttttctcttttttgtcattttctttaagagtcgtaagcagttcttcacagccttttccactccttgcaacaacaggaacgactgttacacctaatagttctgataatcgttttacatcaatgacaattcctctttgcttcgccacatcaaccatgtttaaaccaattgagactggcttaccaaattcaagtaactgcaacgttaaatgcatatttctttcaaactgcgaggaatctacgatatttaacatatgattaaattcttctgttaatagaaagtttgttacaacaccttcatcacgtgaaactggatttaaatcataaacacctggtaaatcaattaatgttccttgtctatcttttaatttaccaaccttcttttctactgttacaccgctccagtttcctacatactcataagaaccagtaagtgcattaaataatgatgtcttccctgtattcggattccctagcaaagctaccttattcacgctaattccacctttatcattttcgcgtcacaatgacgaatactaattaactgtccacgacactccaatgtacaaggacctttaaacatcgctttctgtttcaggcgaagttcgcttccttcagcaagaccgaaagcagctagtctacgctttaatagctgatctaaagactgaatactttttactaacactttctctccaattttaatatctactaaactcataaccttccccctcagaagagaatgataattattttcaaaaaaattataccacacccaatttctcttgtactatacccttttgcttcatatttattaacatttcgctacaattctatttcaattattgtcatactgtattcgtttgccattctcatccatttcgcttacaataaacaatagcaaataaagaatctcgttatcactgggggagccatgccgctgagagggaacacttcgttccgacccttcgaacctgttagttaatgctaacgcagggattgtgcaaacgtccgaaatacatacctcatttttatttacgtatttcgtatcctcctatgatatctattcttttttgtacaacttggatttagggggagacaacatgcgtaacactaatttacaagcgatgatcgaatctgctattcttgcagccttcgccatgattatcgatattttaccattatcacttaaacttccaacaggcggttctatctcattcgctatgattcctatttttattatcgcttaccgctggggctttaaatcagctttcttaggtggtttagtttggggactattacaaatagtcgtgggggatgcttatattttaacacctgttcaagcattcattgagtacttcattgcctttgcttttatcggatttgctggcttattctatcgtccaattcaaaaagcacttttaacgtctaatgaaaatagtgaagaacattcaagtttaggtagtcgcaatgaaaaaccttcagcaaaacaaaaccatggtaagaaaatccttgtttacattatccttgctacatttgtcggtagctttgctcgctatttctgtcactttattgccggtattattttctggggacaatatgcgccgaaaggtcaatcagctgtgttatattcattaatcgtaaatggaagtacaatgcttggttcttttattttatgtacagttttacttatatttttattcctcacttccccacgcttattcaaaagcatcagtgcttatcaaatgaatacacaaaaaaagggcgcttaatgagcgctcttttttcatatcgtaatattaattaaaaatacaataaatgcgcaaaagaaaataaataccattatacttagccaattgctatgcacggttcatcgactccttacataacctcattttctaaccagattatatcgcttaaaaataaagattaggtaaagataatatgaaaataaattaaaaaaagcgtagcatgcattatctacgcttttttcggtaagtaaaagtaaaataatacaccgtcttctgtatttttcactccatattcagcatcgtgtaattctaaaatatttttagaaatagcaagccccagtcccgtcccaccttgtgaacgctgacgagctgtatccacgcgataaaaacgatcccaaattttatctaattgttcttcttcaatgtgagtacctttattttcaatacaaacttttatacgatccttctcatctattgcagaaataataatatcttctttatttggtgtataacgtatggcattcgtaatgaagttaacgatgacttgttcaatccggccttgatttgcaatcacttcaaatgaatgtatatttttatgaacatgaagttcttttttctctatttccacagatagatgttcacatatatcttcaattactgtatcaatataaaacgcagactttttcattttatatgtaccagattcaaatttagctagctcaagcatatccaaaattaaagtatccattttgtctacttctctctccatcgcttgaaaataatactcttttttatgctcagctaccccgtcttttaaaatggaaatacaacttttcataatacttagcggtgtttttaattcatgcgaaacaccagaaatgaattctttccgtgtattttctaactttctttccttttcaatatcttcttctaactgtccaatatgtgaatggagtttatttgatagcacattaatatttttcgacaaatctccaatttcatcttttgaagtaatcggtattttttctgtaaaatctaattgtgctattttcttcgtcgtatcatttatttttaataacggtttggcaatttgttttgagtaatagaacgaagctaacaaaataagaacgactacaaatgcaatgatatagatgtaataatcttgcaccatttgtacagcttcatctacgggctgtaaagaagccatcgcataaatatatgttactgatccgtctttttctattggcttgattaataatttatatttaatatcatttttttcatagtccattgtttgtgttgtatattgtatgggcttgctctcttttaataataaattagtttgaaattcttttatgctatctaagaagatgccatttttataaattggattcacaggaccttttacatctggtaactgtacttttgtaacacgtcctcctatgtaaacgcctaattcctgagcagcttgctcctgaacagctggtttcttttccttaacaagttgttcctcaactgctctctttttctcctcatttaatttgctcattttctcattaaatgctttttctaacggtttattagatccacttaaattctgcttagataaagaaaaagagaatggaataaaactatcttcttttctcactccagaaaaataaatttcttgccctaaaaactgctctgataatttattatcaatttcctctatattgacgagattacctaagggaattttaaatatttgttgtccaaagctcttttgttgcctacgatctatcgttacttcaaaataaaaatcatctgcatgttttaaattcccgttcttatctaatgtcgtaatccacgtattattttctcttaaaaagtcttgctctagtttctgaatttcttctgcatttcctgcataatttaaataattcttctcaaaagaatttaaattcactttaatatcttccacttttcgattcgcataatattgtttaaaaaatatcgtttgtccaataaatatcgtcgctaaaatcaacatacataatgctgttgtaagagtaaataattttagtacaattcctttcttcatacattcccctcaaatttataaccagttcgtactacagttgtaatatactttgctttctctcctaatttatttcttaaattacgaatatggctattcaccgttcgatcatcgccagcaaattcatatccccaaattcttgaaatgagttgctctcgcgttaaaacgattccttgatttttcatgaaatacaccaatatttcaaactccgtatgcgttaaactaacatctgcctcatcaacagtaacagtacgcgacggaaaatggacatggatgccatgaatcgataacgtatcatcttcgttctctaaaggtttcttcgatgcttttctactttctaataatcgtttcgctcttgctaataaaattggaggactatacggcttcgtcacatagtcatctgctccaagttcaaaaccaagtaacgtatcgtcttcatctacacgcgccgtcagcataataataggcacctcggacgtcttcctaatccttcggcaaacagaccatccatcgagttctggcaacatgatatctaaaataactaaatcaacctcttcttcttcaaatacaactaaagcctctttcccgtccctcgcttcaaacactacatattgttcacttaaaaaataatcttttaatatttcgcgtaatatgtcttcatcttcaacaattaaaatgttttttgacataacttatatatccccctctcgctttcagaaactataatttcactttgaataactgccagttaacttcgcctcgataatatatctatctggtgcatcccctatataatcaaatgggtaacaagttgtcagtgttaatatcggttcttctttttttataataacagtacgatcatccgcatgagtaatccatgtcttttgaatttcatatgtgtacgttttattatcatactctaaaacaagggtatccttttctttcaactcttctaaatctgtaaatacagtatctcgatgtccactcagtacagtatgtccccctccagatggagttgtcgttaaatcactaacgaacatacccactccttttttcaaagtcgtatcatctgctccccaatatatagaaaacttcttctttattttcggtatgtttaacatcgctaccttttctccttctttatgttctgtttgagaagaaggcacttgagaagttacaggtgtttcatgagaaagttgagtatcttgtatatttttaaggctctttatttcttctgccgttaattgcccggcagagcttcttcctttataccattccacagcataataggatcccatgaatagccctatagccatcaatatgataccgatataattgagtaacttcattcttcattcctccatgccaaaaatggtaggagtaacctaccatttttaatatatgaaattatcccattctttataggaaaatattttatttacgctttaatcttattgcgacgattcaaaccaaataatgtacctaccgctacaagacatgcacttaatcccatcattgctacattatttgatgctgtatttggtaatttttcaccttgtacaactggctttgcttcttcttttttagctacttcattcttttgctcggcttttatcgctgcttcttttttagccatatcgttttttaactgttcttgcgctattctctttttctcttcttcactttttttctcagcttttattgtttcctcttttttagccatatcatttttttcttgtacttgtgctgcttgctttttctctatttcacttttttgctgttccttgattgcttcttcttttttagctttatcctgttgtacttgcgcttcttcttcctttgttactgttccagtatccgcactcgctactgaagaatatcctactgttaaaagtgccattgcacaaattggtaatagtttctttttcattttcactctctccttatattttattcacatctactcgcatcggatgtattactagaataagcaagagatataaatataagatgcagatgaaatatatttcatttaaagatttcattgtagaaaaagaaaaaaacatcgcaatatgtacgatgtttttttcgggtgtgtgtctcaattatttacatgttactttcgcgtgatttggaagtagaacgggccggagcgataactaattgtctcggctcagttttcttgaagtgatttttgacgttacacttacgacgttgaacaacccacgctttaatagggtttgttaaaataatcttttgctcttcgttaggggcctcttcttcaaacctacaactctcgctccatttattccatttcattgtaaatttagaagaagaatgatcatcttcacgatcaaacaagtgcaaaaaatccatttttccatctagcattacggtgttactagtcgctaaaaaagaaaaggtcgtccaacgtttctccatgccctcctactcctttttcacatatagagtgcctaaaacttaatttacctaaaatatgcttgccttttaccttacacccatagtttatccaaaatgctcttatgcaactatcgatttgccttacaactaccttacatttttgtaagaaacaaaaaaaccttcactctatataatgaaggtttctcactttttatctatatgatctctcatatcatcaagtccagcttcttttagctgcgacatcataccatgcgaaattgctcctaacactaaagtcattccaattaatgaaatacgaatcacaggtacatcaattacgtaagccaacaggccaagaacaattgttaaaagtaatgcttttataaatgttacacttgtgtactgtttcttcttcatcatattcaccctttatggaagcgttttcttaatatacttagtatatcatatcatcagatgattttgtcgttatctttgtaaaaaattactatctcctttgactttttctattctatcctttacagtcgaaatgttcgtaagttttacactgtaggaggattacaatgaatattgaaataaaagacactttaatttctgaagaacaattacaagcaaaagttaaagaattagcacttcaaatcgaacgtgactttgaaggagaagaaatcgtagttatcgcagtattaaaaggttcattcgtatttgctgctgatttaattcgtaacatcaaaaatgatgtaacaattgactttatttctgcatctagctacggaaatcaaacagaaacaacaggaaaagtgaaactactaaaagatatcgacgtaaacattactgggaaaaacgtaattgttgtagaagatattatcgattctggtttaacacttcatttcctaaaagaccacttctttatgcataaaccaaaagcactcaagttctgtacattacttgataagccagaacgtcgtaaagtagacttaacagctgaatatgttggcttccaaattccagacgaattcatcgttggatacggtatcgactgtgcggaaaaatatcgtaacttaccattcattgcttcagttgtaacggaataatcgtataacttaaaaaatcgatagtacataaaatgtatatcggcgatttttttaatatatcgacttaccgacaataactgacaatcttagcacccaattaatagggagaagctgttctaaaatacatgggaacagctcctttctttccattacaaactacagggagagatgaaatatgacaaagacaaaatttgaaaaagtactcctcatcgtaaatccgaaagctggtcaaggtgacttacatacaaatttaacgaaaatcgtaccacctcttgccgcagcttttcctgatctacatatccttcatacgaaaaaacaaggtgatgcaacaaaatattgccaagagtttgctagtaaagtagatttaattatcgtctttggtggtgatggaacagtatttgaatgcacaaatggcttagcacctctcgaaactagacctacacttgcaatcattccaggtggaacttgcaacgacttctctcgcacacttggtgttccgcaaaacattgcagaagcggcaaaacttattacaaaagaacatataaaaccagttgacgttgcaaaagcaaatgaacaacatttcttaaacttctggggcattggactcgtatctgaagtatcaaacaatatcgatgcagaagaaaaagcaaagcttggtaaaatcggttactatttaagcacaattcgaactgtaaaaaatgctgaaacattcccagtaaaaattacttatgacggacaagtatatgaagacgaagctgtccttgtcatggttggaaatggtgaatatcttggtggtattccatcctttattccgaacgtaaaatgtgatgacggaacacttgatattttcgtagtcaaatcaacaggtattcaagcatttaaagattacatcggaaagaaactatttgaagactcaaatgaaaatgacatcttccacgtaaaagcgaaatccattcatattgaaacgaaagaagaaaaagaagtagatacagatggagaaaactcgcttcatacaccttgtcacattgaattattaccaggacactttacgatgatttataatcctgcggttgtgtaataaaaaaacgagtgctagcactcgttttttctcttctaatctagttatattgttggatcatttcctctatttctttaactctctctaaagtaattccatttctttgttcgatcgctaaaggatggtcggttggctctaattcaacatacggtgccgttcctacttctcttatatgtacatttgtttttaaatttaatgtttctggataaactggtatctctacagataaccatccaaaataaagatcactattttccctgcctctttcatcccacttttctaatacttcatcacaactttctttactaagtgatacccacacagtccatatgaaatttttgtggtagtcaattataggaatctctaaacatcctctaataaaataatgttcaccatccattacacaaagatctgatgttaaatggaagcgttcctctctttcatggggcgctacctcgtaataataatatggtgcttcacttccgtagcatagaggtagtgcaaaacgatgcatttgtactttttctccggattttcttcttcttttcatttgtcattctttctcctatccttttcagtcacaatcaaactctacccaatttctccaatgcgtattagcattttcattcacaataacacttggatctttcttctctattgcagcggctactgattggaagaattcattttcacttactttttcgtcttcaacatgtttccattcttccgtttcatacgctacttcccagtcgccttctaaaccgaactcttctaaaatttctcctttatcccaccacaataatttttgagcttcctcattagtagcgagcatacgcataaagtatgttggataatgctctgtcgtttgtacttctattccattatttatataatcctcttctgtaaattcatattcaaaatgatgctcgcgaatttttaaactgccgttataaatattcggtataaattcaccttcatcatcaaacaactcataatcgccattatttaattgtaaaatgcaatcatcacccattgaatgagtaattctatcgccatatacttgaatatcattacatacacctaatgaacctacacccacaatttgaaacaccattagccaatccttagcatctttaaagaaaagagagaatttcacttgtgaaatatccatatattcattatcaaaggcaggaaattcatagttactttgctttttatctaataaccttaaaatctctttttgcacatgtatcaccttttcattaatattatctaacgtttaccgtgctctcatgtagctagaaaaattcctctttcatcactattcgtatactcaatctatcttaacaaaaatgcttttcctacttccatcatatataggccgtacaccgattccatttctcttacttacgcatatattggaatattgttgcttctaatgcagtgtgttttatttttgctcggaggtgttataaatcgtgttcgaatgtaagaacgaactaagtctctctaatatagaaaacttaaaatataattcaaacattcctataatagtaatagccttcaataaccttacttatgtgaaaaatatgttaaaacaattagaaaacaaaaagataaaaagtgaagatatatggatttgggacaataattcaaccgctcccgctttgcttgctttttatgagcaaatatcaactaaatataatttagtgaaaaataatgccaactatggaccacgtttttttgccgttccttatattttcgatttacttccagatttttttgctgtaactgatcctgatttatcttttaatgaaaaaatgtcagataactttttagagtatttaaagcagttaacaatcgagctttcactctttaaagccggccttgctttagacattatacctacttctaatttcaacagagagctcatgtcaaatgaaaaatgtacagtaacagaatgggaaatgcagtattggctttttcctataactaaatacaataaacctaaagttttcaacgctggaattgatacaacttttgctgtttacaataaaaaatttattagtaacggtttttataatgccgtaagggtagctgataatttcacctgtaaacatttaccctggtataaagacaatataatttcagaagaagaaaaaaatatgctaaatacgaaatgggctaactggcactaataaaacgaagcgttattcagtagcagatattactacaaatcgaaaacctactttacagcatatgtaataattcaaaaatagcttaaatggtttcaagctattttttatcaaatttcctcaatactatccaattgagtcttataacattcatcacactctggcctagtaggaagaatccccctgtcatcaggtaataaaaccctcaaaacttctcaatccatctctacgaaagacttcataataatgggatatccttcaataatattcgtatactcaatcccttgttcatatatatcaatttcaaagccaatctctttctccttatggtgcataacatttcccgctaatatatagttacttttattcacaacttcttgtattaattctgttctatctttccataaaccaggtactccaataacgatttgtgtctccatcatatgcactccacttctcatctattttcaatctattctttcaatcttccaaactaaattagctgggatatctttctctaaaaaggttaacatccatacagtttaggcatcctactatgattaaaatctccaaatataacactccatgtgtacatttatatttattttcgtttacatactattgttattcataatccattttagctaataagcaaacgaaagagaactaggtggattaatgtttacttaaaaatattaaattacatttcgaacaaaaaggagctgaatttcctcttctaatttttgtatcacattttggacaatatacatatcattcctctaccttttgtcgttctatcatgtgtaaagatactattttcatactgcacataattccaattaagataaggctaaaaatgagtagcacaacgctcttcctcccttaactacttacctatattttaccattaaataaagataattttatacttataatcctatcttttccttcatactggaagaaactttctttacttctatttactcatcagtgtgattcttttttgtctatataaataaagaatacctgtaacaataaaaacaatcacgccaaaatacaagccatattctatcgcaatcgctacaatactttcaatgtgttgtccaaataaagcaccgagcacaaagtaaacgagtgtccaaacaaatcctgtcgtataagaatacaaagcatacgtcttaaatggcatgttattcattccaactaaatacggtacgatatgtcttacaactggtatgaagtaacttgtgactaacgcataatgaccatacttctctaccatttgttgagatttcaaaagatatttcgcctttttctttttcattagcttatcaagtactttcgtaccaaatattttccctaatatataacctaaagaaagcccagatacaacacctaaatatgttaataaaaatgcaggaatgacacttaatatccctagtgaagatacaaagccaccactcattacgatcatttcgtctggaattggcataccaataatacctaaccataaacagaaaaataatgcccaataaccgtattgttcaatataagataataattcatgtaattccattatgcatatgctctccttagctcttttttacagctaaagacatacgctggtgggaaattgagccacactttctctagcgtaatttcaggaaagaagtgctgtataaatccttttttcacaagtgaatattgaaatgtaataaattcaccattctcatgtatcccttccattacattgtttaaaatacgctttgaaacttcttctggtaaagaggtaaaaggtaatcccgataaaacgtaatccacgcattctatattgagatcttctatatacttttttatattttcggctgaaccgtgtacaacaatgacgttctgctcatctttaaattttctctttagttccttgcaaaacacttcattaatttcaataagaagaaatattgtttccttcttctttctcttcataatttctttcgtaaagactcccgtaccaggacctaactctacaatgcatttcgctttattaaaatcaattacatctaccattttctttgctaatatttttgaacttggcgcaattgcaccagtatgtttcggatgtttaataaattcatgtaagaatgttatgagttgcatataaacctctcctcattcgttcaatagtttttaacttgtttctaagtataactattatttcttaacaaaaattgaggagatttcttaagattttatgaagaataaaaaaacagctatcgcctctagcgatagctgtcccttattacttcgcactcacgatcttataataagaacgaactgttaagaagtaatatccaatataaatcgcgccgtatactccgatactaattagaagcggaatcataatttcaaatggtaatatatttgataaaccttttagtgcaaataggctgtgtaaaataccaattactaacggaatagcaaagataaagctcacttgttttgcgatagctctcttcatctcttgcttcgttacaccaattttatgaagaacaacgtagcgatcacggtcagcacttgcttctgttaattgtttaaagtaaatgattgagcctgttgctaataggaatactaatcctaagaataacccaataaacatcattaagcctgttgtttcaagccccatttggaatcctgtatagaaatcgttaaatggttttaaaacttctgattctccagctggcataatgcttgctaattttgctgttaactctttactatttcgctcaccttttacatcaatattttttacagtacgcgtttcatttacttgtttcacttgctcatatgttttatcaggaacgattacaaatagttcatttaaatttgtaaggcttctattatttacacctttaatttttaattcttttgactcgtttccaacagggaatacagctgtatttcctgtataaagaggaccaaaatcaagtttctcaatatataagctatcatatacgaaagcttcattcgcacttaaatttacaggttctacatctaaatgtttcacaagtgtattaaagcttgattgagaaataagctggtactgattcgtaacattatagtgtgtgttcagaacttgatcagctctttcacctttaaatgttcccttcacaggaatcatttcaacttctgattcatatgtgactgggtgattattcttctctccagcaagtatttcatttacttttttatctaatgctgcatcttttttctcataggaataactatacggcgcagcaacttttgattgcgtaaatgtgttgtaatacatcgtaactgacgtaccaaccgctgttaatgttaccgcacttaaaatagcgattgtcgccagtgatttcgcatttcctttaatacgatatagtaactgtgatgtcgttaccatattcataccattataaaatgctgacttattatttcttgcacgtttcaatacaaatactgtgaagaacatgaacagtaaataagtccctgctactgtcgctaataaaatatataatgcaacgaccataaagtctgcatacataactgctttcatgtacattaatgctaaaaaataacctgaaccgattaagaaaactgaaattaatgccataatgacagatccttttggcattgcttctccttcacgttctgcacggaaaagttcaattaacttaaagcgataaattaaacgatatccttgaagtgatgtatataaaataatcacaaagaaaataattgctgtatcaataatggcagccatcggtacttcaaaatgaacgtttaaatttaatcccatcatatttactaataactcaaggaataattttgaaaggacactaccgatcgcaatcccaattactaatgacattaatcccattaacatattttcataaaagagcattttaccaatttgtcttttacggatacctaataacgaatataagccaacttcttttttacgtttacgtgtaaagaatccgttcgaatatataatgaacactgctacgaaaatgataagcatcacacttgaaacttggaacgctccgctaattttttttgaagcttctgctgctttttccatttgtgaattatattgcagtgctttaaatgtaaaataaataacgatactaaaaatcatagatgcaaaatatacaaagtagtctttaaagttccgctgtatgttgcggagggcaatgctagataaggtcatcagccatacctccagaaatagaagacattacgtcaacaattttttggaagaactgtttacgcgtcgattcaccgcgatgtaattctttatatagttcaccatctttaatgaaaataactcgtttacaataacttgctgcaaacgcatcgtgcgttaccattaaaattgttgagttatcatattcatttaacgacttcatactttcaagtaaatctgttgcagatttagaatcaagtgctccagttggctcgtctccgaaaatcatacttggattcgtaacaattgcacgcgatgctgcacagcgctgcttctgtccaccagatacttgatatgggaactgacttaaaatatgatcaataccgaatttctttgagatttcaagaacgcggcgatcaatctcactcgctttcacctttgataacgcaagtggtaaagcgatattctctttcaccgttaacgtatctaataagttataatcttggaaaatgaaacctaaatgatcacggcggaataacgctaacttatcatcattcatctttacaatatcttttccatcaattaaaatttcaccgttcgtcgcattatcaattgtagaaagaacatttagtaaagtcgtcttaccagaaccagaaggtcccataattccaacgaactcaccttcttttacttgtaagttaataccttttaacgctgcaaatttattcccacccgtgtcgtacactttttcaatattttttgcttctaacactgttttcatctcgacatccctcatttcttctattctctattttcaactatatacactctctactcttgccactatcgatgtttcttacacaaacatgacagttatgtaagacgcataagtaaagatataaaaatttaacctactgaacaaaagtactttgttactataacattgggatatcataccatccattcattctccttacaggaacattacaattttgtaaggttaaaaatgtcccctacaaagttgtgcacgaaatgtcggatggagctatttcgttcctgctattctatgtacagaggaggtcataatatggattcacttaaaaatatgaatactgcaatgcgctatattgaagataaccttacgaatgaaattgattttaaagaagttgcgaggctagctctctgttctgagtatcactttaaaagaatgttttcgtttttagcaggtatatcactgtctgattatattcgctgtagacgtcttactctcgctgcctttgaactaaaaaatagcgatgcaaaagtcattgatgtcgctataaaatatgggtacaactcaccagattcattcgctcgtgcatttcaaaacttgcacggtataacaccttctgaagcccgaaatagtagccattctttgaaggcttattcaccaatgaccttccaattatccattcaaggaggaaatgaaatgaactatcgaattgaagaaaaagagccatttcgaattataggtattacaaaacgagtaccaatcgtttttaacggtgtaaatgaagaaattgcttctatgtggaaaagtttaaacccagattctattcaaacattaaagtccctttcaaacattgaacctactggaatcattagtgcttctactaacttttctgaaggaagaatggaggaaaagggagaactcgatcactacattggagtagccacaacaaaggattgtccagagcagtttaaacagcttgaagttactgcttcaacatgggctatattcgaagctgtcggtccatttcctgatgcattacaaaatgtatggggacgtatttactctgaatggttcccttcttcgaactatgaactagcggaaggaccggagatattgtggaataaacagaaagatatatcttctccaaactttaaaagtgaaatttggataccggttttgaagaagtgataaaaaacaaagctgctcttccctaaaaggaaaagcagctttatttacattttcaactcttctttataaatactatatgactttattgttgatacgataatgcatattaatatgattccaatccctataaaaatattaaatggatctggaagcaaagccccggcatatatacaaagtgaacctattacaaataccctcgaagcaaatctatgtgttttcctccaaactacaggattttctaatgtccagtccattcgaatgcctactaacccgtttggcttcgtttgttgcatgtaattacctagtacaagaaacaatgttccaagtccaaaattaaatgcaattgagcccgatgcaatataattagacgctgctaatagcgcaaataagttacagccgaatcctatcaaaagaatagcataacggattgcggaaaggactttagcatgctgtttatacttatctttcgttacgtcaatatacccaagagctagccatatcaaatacagcaacatcatgcttcctattgaaacagaacttgcttctactttagaaaaatatccatctactactcctgctgcattataatggcgtggaatttgttctggtaaatgtggccatacaatataccatccaattacaatgccaataattaaactccatggtaatacgtgtcttttcatcctctctcccccataattttttattaagcccctatttcttttttataagcaatatatgaatatcccattgttaatcctactgcaccggtaataatgccaatgattaggaaacctttccacgctgccggagcaaaaatacttaaaatcataataactcctaatacaacaaacaccttcccactaaaacggtgtgtctttctccatacttcctcgttacttaatgtccacggtgtttttatacctacaaagtaatttggtttacattgtggtaaatagtttccgatgattataaataaaagaccaacaagaatatatggtgtactcttcattggaatgtcataacctaatccagctccaattccaatgatacttactaaaaataataggaataatacgctataatttattacattataccctttagaaaatttctcataattctcatgcttaggatctatcttaggcaataaagtcaataaagcatatataaaaaccataactgcaacatccaaaatcatcatgcccatttttgacatacgcccatctacctcaccagacacattccaatgactcggaacctctcccggtaaatgcggccacgcgatgcaccatgcaataatcgttaaagctattaatagtaacggaaatatatgctttctcatttcccctcttcccccttattcgtaaatgtaaacacccaagtcaacaaatcttgaaagaccgttgtgtttaaagagtacacaacgaattgccctttcttttcatcttgaataagttcagcatttttaagtgcgtttaagtggtgtgaaatacttggttttgtcatattgaaatgttcagcgatctcaccagcggttagatcaccttcttttaataagtctaaaatttttcgccttgttggatctgctaatgctttgaatgcttgattcaatgtctttcttcctttcgataattagacatttagatacttatctaaatgttaaaatgatttcagttgattgtcaattatatacgaggccctttttacttttctcacttttaacctatactgtttactagcttatctttcaacataatgaaaagacttgaaacacatgatacactatagctacaattgtttttctgaggaggaatatacatatgtataaaattttaatcgttgaagacgatccaaatatttcatcattactgcaatctcacattcagaagtacggttatgaagctgttgttgcagagaatttcgatgatattatggaatcgtttaacgctgtgaaaccacatcttgttttacttgatgtaaacttaccgaaattcgatggtttctactggtgccgtcaaattcgtcatgaatctacttgtccaattattttcatttcagcgcgtgctggtgagatggaacaaattatggcaattgaaagcggtgcggatgattacattacaaaaccattccactacgacgttgtaatggcaaaaattaaaggacaattacgccgtatttacggtgattatgcaccaaatatttctgaacgtatcgttgaagtagaaggtttaaaactattcccagaacgtcctgaaattcacttcggatctgaacaagttcttttaacgaaaaaagaagctattttagctgaaatgttattatctaaattccctcgtacagcaagccgtgaagatttattagctgcgctttgggatgacgaaagcttcgttgaagaaaatacattaaacgtaaacattacgcgtcttcgtaaaaagtttaatgagcttggtattgagaactctattgaaacagtacgtggacttggatatcgctttaacgcaacttggagtgaataagcatgaagctatttttacgtgatcattttgcatttttcctactgtacgttttaaacttcggtatcattttcgttctttatgatgcagtagatggatttcaaaacaataaattttatttcgtcgttttaagtttatatttatttatttgtttcctcgcttaccgttacgttcgcaatcgtagaatgtaccatagattaagcgagcaaccagaaaaaatggaagatgcgtttattgaaagagcaactgctccgatgcctcacggtgtcaatgaactcgtgcgtacgcagtaccgcctcttccaaaaagaactacaatcgtatgaagtaaaacaacaagaacatcaattattcattaaccactgggtacatcaaatgaagacacctgtttctgttatgcagcttatggtgctagaaatggaagacgagcatttaattccaaagtttaaaaaagaattagagcgtctaaaccaagggcttgatatggctttatacatggctaggttaaataacttccatgaagatttccatgttgagacgatttcattaaaagatacggtaacaaaaaatattaacggattaaaagaactattcattcgtaatggtgtcttccctgttttagaagtccattctgatttaaaagttgcttctgatgcgaaatggctaaaatttatcatctatcagttaatgacaaatgctgttcgttactctggtgagcgcggaaagaaagttttcttatctgcttaccgaaacggaaaggatattattttagaagttcgtgatgaaggtgttggtattccgcaagaagatattcgaagagtatttgaaccattttacactgggaaaaacggtcgcgcattcggagaatctactggtatggggctttatattgtaagtaaaatttgtgattatttaggtcactctgtcaaactagattctgaagttggtaaaggaacgacgattaaaatcatcttccacaacgctgcaaataatcaagcagaacatacggagaaggtgaccgaagcatgatcgtaacatatgcaagcaaaatgtatgagaacacactctcatacattttttgcaatacaactacttctatatcttctagccggaggtataatctatgacattttggcaatttgcatttaaaaacgtcacgcgcaactcgagagcttattttgcttactttgtaagtagttccttttccattgctgtgttcttttcgtttgctgtttacttattccatccgaaattacaaaactttgacatgacctctgaaatttcaggattaatgatattttcagaagtagtaattgtatttttctctttcttctttttactatattccattggtactttttttaaagttagaaaaaaacaatttggtgttttgaccattttaggaatatcaagaaaacaattacatcgtcttgtttttatggagaatatgttaatcgggattttatctatctttttcggcatgcagtttggagttgttttttctcaattttttttattagtaacagccaaacttacgcatgttccaggaatatatttatacggtcctactaacgcgtttattttaacaaccattgttttccttagtctttttatcattgtatctgcattcacaccaatgcttattcgtacaaaaaaagcggtacaccttttaaaaacaaatggtggaaaacaaaaagaaagaaaaccatccatacttgtttcattatttggtgcgatttgtttatttggtggttatgcgttagctggaaatcctaaatatttcgtatcagtaagcccgcaaatcggtgttatatatatggtttcgagtattttcgttatcccaatgcttgttacaataggaacatattttttcttttctcaaattagtttcttactgatttatattttaaagaaaagaagaagattttatatgaaacggattaatatgctttggatttcagatttagcaaaccgtattcggacgaatattaatatgctttttattgtagcgatgctctctacaattgctttcacaatgatcacgttcctatatggattcgggaaatttattaagctagaggtgaatagaacttcccctttcccaatttcttatttctcgtatgatgcgaacccttttgttacagagcatttaaattggcttgagcaacaattacaaaaagagcatttcccttatcaaaaaataaaagctgatatatatgaaacaccactaaaagaagataaagatatagctatttataatgacgtatacgcaattaagcaaagtgactataacaaacttgcgaattctttacgaatgaaacaactatttatggatgataacgaagcatatgtgttaacagggacatcttatatcaccatattcaacgaatttgagcaaagctacaatagagattacattacactctctagtacaaatacgaaattaagagttaaaggctatgagcatgtaaacgcaatcccatctgacttttcatatcaaacgatagtgttgcctgatgttatcgtaaataacttacctaacaccgtaaaacatatatcagcatacaattacaaaattcaaaactgggaacagacatatgaaattgctgataattttatagaaaaggtacaaaaagatcgaaataaataccagtatgaagggcctcttattcgttcctttgaatcagcaggatcgttatacaaaataacatcaggtagtgccgcgtacttcctaatcgggacatttttaggagttattttcttcattggagctggtagcgttctttactttagaatgtatacggatttgacgaacgaacaagagaaatatataacgatttctaaaatcggtgtaacagatacagagatgaaacgatctgcaaccattcaacttagtattttatttttcattccgtacattatggcatccattcatacaatgttcgcaacaaaaatgctacaagatgtaattggtttatctctgttcaaagaagtttcagccgttcttattatttttggattcgttgaaatcgtatttttcttattcattcgttcactttatatgcaaaaattatcacattacacgagtggacaaaatatttaaaacaaacttgatgaaaagagtatctctcatactcttttcatcttcaccctattaggaggtttaggtgaatgacattttggcagtttgcatttaaaaacgtcacaagaaacgccagagcttatttcgcctattttgtaagcagtgcgttctccatcgcaatctttttctcatttgcagtttatttatttcatcctaaattgcatatgacagacgtgaatttttctctgaacatattaatgacaatttcagaagttgtcattgtgttcttttcatttttctttttactgtattcaatcgggacgtttttaaaagtacgaaaaaaacagttcgggattttaacagtgcttggcatatctcaaaaacaattaaagcgactcatatttatagaaaatatgttaattggtgctctttctatattttttggcattcaacttggacttgtcttttcacagttctttttgttagttaccgccaaaattacacacgtacctggtttatatttatatccgcctacaagtgctatcgttttaactatcatcatctttctcggcctcttcattctcgtatcatcttttacaccgatgctcattcgcacgagaaaagccgtacgtcttttaaaagaaggaaaacaacaaaaagaaagaaaagcatccgtgctcatctctctatttggtgcgacctgtttaatatgtggatatgcgttagccgcaaatccgctgtattttatgtcgctaggtgacataattgggcttttatatgccgtctctagtatatttgtcatcccatcgcttattgcagctggaacatactttttcttttcacaaattagttttttacttattcgtattttaaaaacacgaagaaagttttatatgaaacgaattaatatgctttggatttcagatctagcatcacgtattcggacaaacattaacatgctctttattgtagcgatgctatcgacgctcgcttttacaatgattacattcttatatggattcgggaagtttacaaagtttgatgaaattagacaaaaccctttcccgtttacttatttatcacatactgaaaatacgttagctgatgaacatttaaactggttagagcagaaatttaatgaagagcactttacttatacaaaatttaaaacggatatatatgaagtatcttcggctgaagataacacgcagctctattatgccattaaacaaagtgactataatgtacttgctaaggctttaaattgggaaacgctcacggtcaataagaatgaatcttatattcttatgaaagacttagatgatcaagttattggaacgcttcataataaagacaacaaaaatactcttacacttactcaaaacaatttacaactacaagtgaaagaatataaaagttataacccattcccaaatcgcttaatataccaattgctcatactatctgatgaaaatgtagaagcattatccaacgtttcaaaacaaatgagtgtatatagctttaaagttacagattgggaaaaagcacataatatcggttcatcgtttataacaaaaatccataacgataatgcagcaattcaagcagagcatccacctttccatgcaagtgaagcgagcgattctctatataagacaaaactaaatgtcgcttcgttcttcttaattggtactttcctaggagttattttctttatcggtgctggcagtgttctttacttccggatgtatacagatttaacaaatgagcaagaaaaatatataacgattacgaaaatcggcttaactgagactgaaatgaaacgttcagcgacaattcagcttgcgattcttttcttcgtaccttacattatggcatcaatccatacgatgtttgcgacaaagatgctacaagaaatattacatctctcgttcttcgctgaaattacagtcgtactgttgatttttggaacagttgaaattttatttttccttttaattcgttccttttatatgcaaaaattatcacaacacattaagttttaaaaagtagaaaggtgattactatggaagaagtattacacataaaaaacgtctcaaaagtatatgaggggaaagtccctcatactgctttaaaaaatataaatttacacgtggataaaggggaattcgttgccattatgggaccatctggtagcggaaaatctacatttttaaacgttatctctacaatcgattctccgacttctggtgatgtcgtgattaacggaaaaaaaccgcacacatttcgtagagagaagttagctattttccgaagacaagagttaggatttgttttccaaaactttaacctactagatacactaacaatcggtgaaaatatcgtactacctttaacattagataatgttccattaaaagaaatggatgaaaagcttgataacatttcaaaaaagcttggaattgatcatattttggacaagcgtatttttgaagtttctgggggacaagcacagcgtaccgcagtagcacgtgctgttattcatcacccttctctcttactagccgatgaaccgacaggaaacttagattcaaaagcggcaattgacgtaatggagttatttacgaaattaaataaagaagaagatgcaacgattttaatggttacgcacgatccgtttgcagcaagttattgtaaccgtgttattttcattaaagatggagagctttacaatgaactacaccgcggattatatcgcgagaaattttatcaagaaatattagatgttctagcgttattaggaggaagacgtggatgacattttggcaattcgcatttaaaaatgtctcacgtaattcgaaagcatatttcgcctactttgtaagtagtgctttttctatcatggttttcttttcatttactgtatacgcgtatcatccgcgcttacagagtgtacaaagctttcaagaacgtgatcctctaatgaacttagctagtacagcacaacttgtgatcgttatgttctcgttcttctttctcttatattcaattggaacatttttaaatgttcggaagcagcaattcgggatactcactattcttggtatctcacagagacaattaaaaagattgttatttaccgaaaacatgataattgggatattatctatctttatcggcattcaaggtggacttgtattttctaactttttcttattagtcacttcgaaattaacaagtgcgaaaggtctctatttatattggccaacagaagcgattatcgttacaaccgtaacgtttatcattttatttttaatcgtttctacatttacaccaatgtttattcgtactcgaaagacagcccacctcattaaagggaacaagaaaatgccagctgaaaaaagaccatctatactcatctctttattcgctttaatttgtttagggctatgctattatatcgctggttatccgcgaggctacgtaacggaaaaaaatgtgcaaaatggatctgtcttttttattatgttatctattttaccgctcgtaatagtcgggacatatttattcttttcacaaacattccttcttttcatctatattttaaagaagcgcagaaagttttatttgaaacaaataaatatgttatggatttcagatttagtttctcgtacacgcagtaatattaatgtactctttattgtttctatgctatctgcacttgcatttacgattattattggattattcgccgctaataacaatacgaaggcatcagtattagagcgatatcccgttcccttcacgtatacatcagaaggtgacaattcccttgaacaaaagcatatttctacaattgaaacggagcttacaactaataattttctttacaaaaaatataagtttacagtattaaaagatacagcttccaaagaagatattatgcttatgaagatgagtgattataacgcaattgctaaacaattgaaaagaccggaaataacaatcgattctacagaagtttatattatttctcggcactcaccagaacttctcgatctcgtatctaatccatttgcaaagcaaaatacgattacactcgggtctaataaaaaagaatttcatattaaagggtttattaataagggaatcgaaccatcctttgcattcccacatttagctgtcgtacaagattatgtatttgataatatgattcctcatattgaaacaactgtaatctataactacttcgtagaaaactgggaaaatgcaatcgttccaaccaaaaatatgttacgtgttattagtggcgatgcgcgtgagttctacgaaaagcatacagaagagaacgctcaagttcctttcttcatacatacggctacggatgaactcatttacggtaaaggaaatgcagttgctcaattctttatttgggcatttctcggctttattttctttatcggtgcggctagtgttctatacttccgtatgtataatgacttaacaactgaaagacaaaagtatattacgattacaaagcttggcttaactgaatcagaaatgtttcgctctgcaacgattcaattaggaattttatttttcgttccttacatcgttgctggtgttcacacattatttgcggttaagtttttacaaagcatgttttctttctccttactaaaagagacatgtatcgtactcacctttttcgggattatcgagatcattttcttcttcttaatccgttctctgtacattaataaattatcacagcatataaaaatatgaataaaatggccttgtgcgtattgcacaaggccattttcaatagtttttaataattagcagcaatatccgccgtagccaccatatccgtagccgccgtaaccgccataaccacaaccgccgcctccgccgaagcagctagcaccgatgataattaataaaataaacaatacgattagaagcgcaaaaccgcctccgcaaccatgtctgcggttacaatcatcatgtctgtgttcacacttttcgctcattaccctattcctcctttagtatcattcataacaagttcctcttgttctaaatgaggggattccatttatagtatgttttcagggcgaataggaagcttggctttcttaaaaacgggcttgtttcagaaaatgagccttatcaagatgtaggtataaaacatttgacatactaataatttcttactaatatttaattgaacgatcaatcaattttttgattatacattcaaattatataaatcaggagttgaatagcgtgactgattcttttattgcagaggctaggcgtgaacaaattattcttgcatgtattgatacattagaagaggttggatataacaacttgagcttaacgaaggtggcaaaaaaggctaagattagtaccggacttatttcttatcattttaatgataagctttaccttatgaaccgtacattacaatttttagttgccaaacaacatgaatttattagtaatcgagtactattagctcaatctgaaataaataaactagaggcttttattgaagcacacttggcttatcaagaaactcattacaaaaataatattgccttaattgagattgtctttaatgcaagaaatgaagagaacattccttattacagaatcgaagacgacgaagaggatgctcttagaacgatgttattagatattttgaagactggacaacaaaatggcgtgttttctaactcttttcaaaccgacacattagcttcatttattttaggagcaatcgaagaaagaatgttgaaggcaaattcatctatatccatagaaaattactcagatgagctcataaaaatggtgaaaaaactcactatttaaaacatgccctggttaaaaaatatatataagaaaggatgaactacacatgaaaaaggcatctgtcattggattaggttttttagaaaagttacttgctatagtaagtccaatccttttaggcgttattggatatttttcacctaaattaatagagattataaaaaagattcctctcttttctgattcaaaaattatagaacttttaaattttattaatcccttctggcttcctattatcctcatgctaattggtgttattgcaggaattttattttctttaattatttatagtgaagctttaaaaatgaacattacttcggaaagcattcacgtgaataaggacgatcaaaagaaacaaatcaccagatcaaatgtaaaagccgtttttgtagataagcgtcaagtggttatcattgatcaagaagaccgagaatggttacgtgaaacatctgacattaccccaagcaaaattaaagatactttcttaatgcacgacttcccctgggtggaacaagatccttataaacatgagtatagcttatggaaattagaggatgcgcgatttaataaaagcataaatactattttgtatgaaagacgaaatgcccttcgagaaggaaactcgaaaaaaaagaagcatttacgcaaagatttgaatgagctaggagtctttgtcaaagacgatggagaaaatcagtatgtccgttctattaaataataggacaatagaaaaaagatataaaaagcaccttgccctgtatatttgtaagtaactacgattaaaaaatagcaaaacccacagagaaattgaatttctcctgtgggttttattaattaaaatgggcttttctccctaaagaaacatattcaacaaaagagcaaaaccaaatgcaataaatgataacaatgtctcgagtaccgtccacgttttaaatgtttccttcaccgtcaaacctaaatactcttttacaagccagaaccctgcatcatttacgtgagaaaacattaatgatcctgcaccggttgcaataactagcaactctaaattcacaccagacatgtgctgaataactggtgaaacaatccctgctgctgtcgttaatgctactgtagctgaacctgttgcaattcgaattaaaccagctaccatgaaagctaatacaattggtgataacgaaatatgttctgccatttgtgcaatagctgttccaacgccgctttcaattaatatttgtttaaatccaccgcctgcaccaattattaaaataatagaaccgacaggcaataaactttcatctgttaattttttaatcatctttttattaataccttgtttgataccaagtaaataaaatgctgcgaaacatgaaataagtaaggcgattactggactccctataaacacaaaaaattcagtcaattttttcggtaatgaaatatatggtgcaactactgataaaatcatcaatacaactggtaataaaataataaagaatgaaactttacgacttggcaaatcagttgatactgtcgtaactcgaacaagctccggttcattttcaggtataaccctcttatgtacccactttgcaaatattgggcctgcgataatggctgttggtaacgcgataattaatgaatataaaagtacctttcctaagttcgcgttataaataccgattgctgtcatcgcccctggatgtggtggtacgagcccgtgaacaatagataatcctgcaatgacaggtaacgcaattaataatatattttgcttcgtcgtttttcgaattgaaataacgagtggtaataaaatgacaatccccacttcaaaaaatacgggaatccctataacaaaccctgcaaataacatagcccaaggtaatttttttacaccgaaaaatcgaataaagaaatctgcaacttgcatgcctgcccctgaatcggacatcatttttcctaaaattgttccaagtgctaaaataccaactaaatgccctagtacactaccaacaccagtttcataggcagccactattttcgttacattcagtccagacataatagctaaaaataaactcgcaactgttaaactaataaatgcatgccatttccaccatgatacccctaaaataacaattgtgatcgcaagtaacgtgacgattaataagtatatatccatctctcattccccttacttttatcccgattggtgtgagctaataattagtggatgatgccctcctccactaattaaagttttactttataaaaaaagagggaacatggtattatcccctataggtagacagtaaaaaaagagtccatctgatatgatggactcaatactgttttatctggaggggatttttttatggcaagaaaagagttattgttgcttaagataaatttcagcaacactctcacttcacgtctaaacgcttatagagaaacgtgtcgcgcctgacttactacttaaaatctcttccactttcccctggctaataattgaaaaagcttctcttcccataccagagtccataaataaatcgataatatctttcaatctacatgattgtttattaatataaaaatcactatcacctgaacgagatacacgacgtgttacacacacctcattgtattcaattggtaaacgttgatcttcattatttaaagttattgttacttcagcaacattaaccgctctcctcgtatcactgcctgcaaaaataatatcctccatctttgcaccacgtaatgattttgcagattgttcaccaagtacccagcgaattgcatcagtaatattacttttcccgcttccattaggtcctactacagaagttacacctgggacaaaatcaacagatacacgctcagcaaaagacttaaaccctgctatttctaatctttttaaaaacacgaaaggccttcctcctattctccgccgttataaatgttctctatataaaaacaagtattatacggatttaccttctttttctttataaacaaaaagaaagtttcattctatgcataaggaatccccctcattcaaagggggattccttatagttgttcttttaattttttcaatgcttctgcagcagcttgttgctctgcttcttttttcgacttaccactaccaagacctaaagctacgttatttaacgtaacacgtgacacaaattctcgattgtgagctggtcctttttcttgcaaaatttgatactcaacattgccactgccatcacgctgaatcaattcttgcaactgactcttataatccatcacatgagaaaaagcaccctcattaattttcggatatacaatttcttttaagaattcccaaactgtttctagcccttgatcaagataaagggcaccaataaacgcttcaaagacatccgctaataaagctggtcgttcacgtccacctgtcatttcttcaccttttcctaataaaacaaggctgccaaatgacaattcgttcgcaaaacgaacaagagatggctcacatacaatagctgcacgtagttttgttaactctccttcgctcattgtcggatatttttgaaacagatactgtgatacagtcagttccaatactgcatctccaagaaattcaagacgctcattatcttcatgcggtttttttcgatgctcattcacatacgatgaatgcgtaaatgcttgaatcaataatttttcatctgtaaacgtaatacctatcttttcttgaaacactttaaatgcttcacgatattttgtttcgtattttttttctctatattttcggtacggcataggtccctccagatataagccagaaagccccgctaaaaaacgggacttcacttaagcattatagatgactctctatgtaagtcacagcatcgccaacagtagcaatcttttcagcatcttcatcagaaatttccatttcgaattcatcttctaattgcattacaagttctactacatctagggagtctgctcctaaatcttccttgaagcttgcagctggtactacctcagtctcttctactcctaaacgatcaacgatgatttttgttacgcgctctaaaacatctgccattccattcacctcccctcaaatattatattaaatattgaccaaaaaaactaggtgaaatcgattcttttattacattaccataccgccatcaacatttaacgtttgacctgtaacatatttgctttgatcagaagcaaaaaacgttacagcattcgcgatatctttcgcttcaccaaattgagcagctggaataacttttaacatttcagctttaatattctcatctagtacatccgtcatatcagtcgcaataaagcccggcgcaattgcattcacagtaatatttcgacttgctaactcttttgcagatgtttttgttaatccaataacacccgctttagcagcaacataattagcttgccctgggtttcctataacacccacaacagaagcgatatttataattctaccgtgacgttgacgcatcatataacgagatactgcttttgtacataagaatacaccttttaagtttgtattaataactgtatcccattcttcttctttcatacgcattaataaattatcttttgttacaccagcattatttacaagaatatcaacttgtccaaatgtatctactgtttgtttcaccatatttgtaacatcatcagcatttgcaacatctgcttttaccgcaattgcatcagaacctaatttcttaatttcatctactacttcatttgctttttgttcattacctgcataatttactactacatttgccccttgtttcgctaaatcgatcgcaatcgcgcgaccaattccacgtgaagcgccagttactaatgctaccttcccttttaacatcagttttctcctctcaaatttgaaatggtatcttttaatgtctcttcatcatatatcgcatatgctttcgctgatgaatcaattgacttcataagtccagcaagtacttttccaggcccaatttcaataaatgtatctactccctgcttcaccatacattcaatagacgggtaccataatacaggcgaataaagctgttcgattaacttttcttgaatgtcggcaccacgtgtaataacatccgccgtaacatttgcaataacaggaatgttcgtatcatgaattgtaatttcattcaaaacactttgaaacttctcagctgccggcttcataagtgaagaatggaatggcccacttacttttagtggaattgctctctttgcaccattttctttcgctctttgagaagcaacctctacgccttgcttcgttccagaaattacaatttgcttcgtactattcatattagcgatttgcactgcatatccttcacttgttacttcttctgtaacttgtttcagcatatgtgggtcagcacctaatatagctgccattgcaccttccctgcccggaacagcttcttccatatattccccgcgtttccttacagcatataccgcatcttcaaaagttaatgcaccagctgctacaagagcgctatattcacctaaactatgaccagcgacaaagtcaggtgtaatgtcatactctttcaaagctgtcaaaatagcaaaactcgttgttaataatgcaggctgcgcatttgttgttaatgtaagcttttcctgcggtccttcaaaaatcacttctgaaagtgaatcttgcaacacctcatctgcttttgcaaacacttttgcaacctctttattattctctgctaattgtttacccattccaactgcctgtgaaccttggcccggaaaaagaaatgctatttttcccatttcaaatcctcctcttattggagtgactctttctccattacgcttgaaatcgtaggaattacttctttcgctaccatttctctcgtttgacgaatcgcactaaatatcgactggtcattagaagaaccgtgagccttaatgacaggtgctttcaatccaaataatgcagctcctccatactccgaataatccattttatcttttaataccataagttttggctttaataccgccgctgctaatttactcgtaaatgaactcattaattgttctttcaacatagagaatagcgcaagtgctgttccctctaatgatttcaacgctacattccctgtaaaaccatcacatacaacaacatctgctacaccttgcaataaatctcttgattcaatgttcccaacgaaattaattggcgcatctttaagcattgcaaatacttgctttgaaagctcgtttccttttccatcctctgttccaacgtttaatagtccaacgcgaggattttcaattcctcttaccttctcagcataaacagatcccattactgcatattgatataaatgaattggttttgcatcaacatttgctccaacatctaacataacaaaaccttttccatctacagttggcattgtaggcgataaagctggtcgctcaattccttccatacgaccgacaacaaataatccagctgccattaaagctcctgtactacctgcggatatacaagcgtctgcttctccatcctttacttgttgtgccgcaagcaccattgaagcttgtttttttcgacgaaccgctcttactggttcctccgttgattctattttttcgtctgtatgaagaatagtaattcgttcatcactcgttaagtattgacgaatttcctcttctttccctactaacgtaatatgtaaatcagaatattccttaatagctttcattgcccctaatactacagcctttggagcgtgatctccgcccattgcatctattgcgattttcataagttgttaccttcctcactataattactagatcgatacatttcaaaagtgcctgtaaaaacaagttcttctccaacgaagctacgcactttgacaaccgtccgtcccttatcattctctacatcttcaacgcgcgcttttgcaacaacacgctctcctaattttacagggcgaatgtatcgaatggtagactttgcagttaaagctaattcttcatcaataactgcaacagctagtgagtttgcttgcgcaaacagatgatgcccacgggcaatttgatttcttttaaatacatgttctacctttacttcaaagatagagattgcatgtctatctaattcaatatcaataatttctccaacaacctcttctaacggtaaagatttcacatcttcttcatgttgctttgtagctacatgtttaattctctctcttaattcaggaatagacaattccatacgatcaagtcgtactgtttgtatactcacttgaaatttttccgctaaatcttcatccgtaataaaaggatttgattcgattgtttgttgtaataactcttgtctttcttttttacttcttctttttttcataccgcaccatccatttttatgactaggtactaacagtagtatataatcattaaaagtagaatgcaacaaaaaattttgttgactccctttaatcgagcttctctccttggaacacccctgtcccatcaagatacgtacgcaaggcagcgtactgatcattgtgccaaaacgcttctgaatctactagtatcgccgcatcttgccttgctgtttctaacgctcgataatcatgtaccatgtcagcaaccttaaattctggtaagccactttgcttactcccaaagaaatctccaggacctcgtaattctaaatctttttctgacaatacaaatccatcatttgtttcagtcattatgcgcattctttctttccctgtttctgatttagggtctgctattaataaacaatatgattgctcactaccacggccgacacgccctctaagctgatgaagctgcgataaaccgaaacgttctgcatcataaataaccattacagtcgcattcggtacgttcacacctacttcaacaactgttgtcgatacaagaatttgcactttattttcactaaactgtcccattatctcttctttttcctgagacgataatctcccatgcatcaatccaacttggcatttcccttggtaatgatgcgtcagcatactatgtaagtcgatagcattttgcacatcaagtttctcagattcttcaattagaggacaaataacgtatgcctgtcttcctttttttatctccttttcaacaaaaccgagaacgcgatctaacatatcatgttttgcccaatatgtttcaatcacctttctacctgctggcatctcatcgattatcgaaacatccatctctccaaatgcagtaattgcaagcgtacgcggaattggtgtcgctgtcataaataatacatctggactttcacctttctcccgtaaaactcggcgctgcgctacaccaaatcgatgctgttcatctgtaataacgagacccaacctatgaaatataacttcatcttgaattaaggcatgcgttccaacaagaatatctatttctccttgttctaacttcgctaaaatttctcgacgtctcgcacctttaacagaacttgttaacagttccaccttcataccaaaatgcgaaaacgtttcagcaagcgactgataatgttgctcagctaaaatttctgtaggaaccattaaagcaccttgataatgagctaatttcgatgcataaaggccaatcgcagcaacaactgttttcccagaaccaacgtcaccttgcaatagtcggttcatccgataaggagatgtcatatctttcaaaatttcatctacaactcggtgctgcgcacccgttaatggaaacggcagtgcatcgataaattcttgtaattctactgacggaatctctttcttcgtcccttttgaattttccctctccattttccggagcgtttgcattttcagctgaaataagaaaaattcttcatatacaaaacggcgacgcgcttgcttcaaatcttcctgtcctaccggaaaatgcaatgccctaagcgcttcatatcttggtaataatttatatcgccctaacaaaccatccggtaacacttcgactatagaatctccatattcctttaacgcttgagcaataaaacgacgcatctgttttactgtaagtttcccctttactgaataaacaggttccacttcttgttgacgtacaaccggcccaaaatgaagttctgatacagcaattgtttgacgatgttgatcccatttaccagtaatcgttaccgtttcatctaactttaatttttgcttatagtaaggcctattaaaacataccgccgtaattaaataacgaccgacgagaacacgaactgttaaacgcgatttcttcttaccataatattgcagcaaaggagcactatgaatcttcccttcaaccgttacacgttcatcatgctttacttcagcaagatctttcatcgcataatcttcataacggtacggaaaatgttctaatagatgagaaactgtataaatacccatctcatgtagtaactcagatgtttctcctcctatcccctttacatccgtaacaggaacttgtacaacatcattcaagattctcacaccccgtcacattattttctttattgcattttatttgagtaccaattagcatctgtaatcgctctctttcaccttatatattctatcataggcattctaagagaaactactcaaatcccttatataaaacaagtaaaaaagagcctcactattagcagcaaggctcttttctctcttcaatatgctagccttttgaataaaaactagtaataaccttcatattactacttcttatccattagcaagtaagtaatccatttattttcaaaacgaatcttatcttattctacagagaagatgaaagaatacactggttggtttccagcatgcacttctacttctgcatcttcaaatttctcttctacaaattcaactaactccgctacttcttcgtcagttgcatcttcaccttgtagaatcgttacgatttcagaatcttcatcaataagcgcttctagtaattgcttcgcagctcctactttttcagcatttgtagatacaattttcccatctgcaatacacatgaaatcatctttttgaattgctacaccatcaatttccgtatcacgtacagcatacgtaatttgacctgttttcacatgagataaagcttcttgcatgttttcttcattctcttctaacgttccaactgggttaaatgctaacattgctgccataccttgaggaactgttttcgaacgaacaacaataacttcttgatctacaactgatgccgcttgttctgctgccattacaatatttccgttattcggtaaaataatgattttttcagcatttgcttcttcaattgccttcacgatatcctccgtacttggattcatcgtttgaccaccttcgataactttcgttgcgccgatgctctcaaataaagttttaataccagaccccatagctacagttacgataccatatggttgtttttctttcgattgagctggttgttcaggaaccatagtaggttcatctaataaagcagtatgctgttcacgcatattttctactttaatcttaattaaactaccgtatttttgcccgtagttcatagcgtctccaggatgttctgcatggatatgaacttttacaatttcatcatcagacacaactagtagagaatcaccatatacactaatatcttcacggaatttttgttcagagaaattatgctctttcaccttttcagcctctaatttcaccatgaactccgtacaatatccatacttaatatcttctgtactcaattggctttgtacactacggtgatgttctgcgcgtaccatttcattcatagatggttgcgtcggtgcatcagaagaaatcgtttctccttttaagtcagctaaaaatccttcgtataccactacaagacctttaccaccgctatctacaacgccaacttgttttaatacaggtaataaatctggcgtacgatttaacgatgcgtttgcttctttcacaacgtcttccataaacaaaacaaagtcgcgctgttttttcgcaactgttactgcatatttacccgtttctcttgcaaccgttaaaatcgttccttcaatcggtttcataaccgctttataagccgcctctactccagcttctagtgctgcagcaaaatcaactgttgttaattcttctttttgttcaatggatttagagaaaccacggaacaactgagataaaataactccagagttaccacgagctcccattaataatcctttggctaaacttacgccgactttaccagcatgctgtgaagggtttgctttcacttcacgcgcacctgaagtcatagataagttcatgtttgtaccggtatcgccatctggaactggaaatacgtttaatgcatcaacaagctgaacattgtttgttaaattattcgctccttgcatgatcatttgtgataaacgttttccatcaattttttgaattgacacagattttcctccttaatgcacattacaagtttattactttaactccttgtacgtagatgtttacagaatctactgctagtcctacagtttgatctaatgtatatttcactttcgtctgcacattatgtgccacttctgaaattttcgtaccatagctcacaataatatacatatcaatatgtacttcatcttcatctttacgaacaataacacctctagtgaagttttcttttcgtaaaatgtctgttaatccatcttttaactgattttttgatgccatacctacgataccgtagcaatctaccgcggcacctccagcaattgttgcaattacatctgtactaatatcaatttgaccgtacttcgttttaatttcaattgacatctcgtttcccccttcataaatggtgaaagtgagctagactactttagttactatcatataatctttttaaagaaaattccatcgttctttcttttcactctcatattttatgttttaaattacacttttttatgatgagcaaaatagtccattgttattatacaacatgtaccactataatatgtcaagcaatttttatggatttcaacttttcttcattgacatatagtgtcaagtaaattttcttgatttcttttttctacggtgttgcattctctttttagttgtgttaaattatagtagtgtttttagcatcgcataaaagactaacattgaaaaattacgtatggtaaggtatcaagggagggaaatataaatggctcgtgtttgtgctattactggaagaaaagctcgttctggtaactctcgttctcacgcaatgaacgctacaaaacgtaagtggggcgctaaccttcaaaaagttcgcgtacgcatcgacggaaaagttcaacgtgtttacgtttctgctagagcattaaaatctggcaaaatcgaacgtgtttaataataaaaaaaagagccgataggctctttttttactataacaatggaaaaagcaccggtgataggtgctttttttaatcttttttgaaggtatttaacattgcacgaactattccaccaagaaatttaggtaacttaattgtataaaatctcatggtttccctcctaatccccattactccacttggtcactatatgatgtaaggagcaaaattgtttcttcaatcagtgcttcttatcaacattaatatgccagaagtaaatgaaaaagtacctttttcctcaacgagttcgttactaatacaaagtgttgatccccactctattgttttattagtaagagggtacttaaaaccaaacaatgtaatcccttccactatttcagtaactggtacaaaagatacataaggaaaatttttattttcttcaattatatgtgtacccatttttttaactgttatttcatttttattgtccacaatacacatttctatctctacttctaacccttttaaaagcatctgtatatttgccaaaccgtgatcaagccttccaccagtagcaccaaaaatacgaattagtgtcggcttctgttctaatgcccagttgattgcaatttctaaatccgtttgatctttttcccgcggaacaatatgtaattcgttcgtttgctgtcccatccatactaattcttcttcagtaactgaatcgtaatctccaaacgcaacagccggggtaatccctttctttaatagacggtatactcccctatcaaccgctgcccacactacttcctcattctcgtatcgagcaaaatctgcgcaatattccgaaggtcctcctgccaaaatatgaataatcattttttcttctccttccattgtaaaaaggcaatctgccattcggtagattgcctttttacatatttttatcctatcctataaatgccttactaggataaaagttcatcactacccacgaattacgcgaattgcttcaccgcggtctttttgattgtatactgctgacccagctacaagtacatttgctcctgcttccacacaaagtcttgctgtttcagcatttacaccaccatcaacttcaatttccacttctagattgcgctctttcaccatgtctgcaacttgtttaattttcggtaatacagaatggataaacttctgtccaccaaatccagggtttactgtcataagtaataccatatctatatcttctaatacatgctcaatcactgaaactggcgtatgtggatttaatacaacgcccgctttaataccatgagatttaattaactgaattgtacgatgtagatgcggacacgcctctacgtgaacagtaataatatccgctcccgcttgtgcgaaagtcgggatatagttatcaggattttcaatcattaaatgtacatctaatggtaatgatgtaatcggacggattgcttctacaattaacggtccaatcgtaatatttggtacgaaatgtccatccattacgtcaacgtgaatgtaatccgctccgcccttttctacatctttaatctcttcccctaattttgaaaaatctgctgataaaatcgatggtgcaattttaatcataactaatacctcggctttctctctctaatttcttctacgaattgtttatagttcttatagcgatattctgtaatcttcccttcttcaaccgcagctttcaccgcacatttcggttcagaaagatgtgtacaccctctaaatttacagtattggctcgcttctttcaactctggaaaacaatatgtaagatcttctacttctatatcaatgaaatctagtgaactaaaacccggtgtatctgctactagtccactcccaattgcaattaattctacgtgtcttgtcgtatgcttcccgcgtcctaaatgggaagaaatatcatttgttttcagctctaattctggacgtagcacattaagcattgaagatttcccaacaccagattggcccgcaacgacagaaacacaattttctaagtatggttttaatatatcaatactttctgaagtattaatagaagtaaataaaacatcataacccatctcacgataatcattcgcataagcttcaacagttgctttcatcttttcatctactaaatccatcttgctaatacaaataattggcttaatgttatgatattcaatcagcactaaaaatcgatctaacagtccaggattaaaatctggttctactgcagagaacacaaggatcgcttgatcgacattagcaataggaggtctaacaagttcattttttcgatcaaacacttcaagcacataaccttcagttggattatctgcctgaaaaacaacttggtctcctacaagtggtgtaattttattttttctaaatacacctcgcccacgacattgcgtaaccccttcttcatgctgcacgtaataaaacccacttaaagcttttataatttttccttctggcatagaattctccttttttgtataaggtgatgctgaatttaaaaatgaatggatttaaattttccaaataacgatttcaaaacctaccatatatactttcgctaatatacattgaatttcccattaaatgcaaaaaaatatttacagctgcatcactttactagctttttgaatcatatatttttgcctgctataccgtccactttgtagacagcataacaggcaataataataagtagactttcactattattgagttggatatggtacttctttatcaataatcgttactccatcccgtacaattttatagtgtccctttgaaccttcttgaattacaaattctaaagaaatagtcgctgattcagtaattgttctcgtttcaaccggtctatccattttttgctgcatgtcttctttataaatttctattgtttgcggctttttttcacctgttacagcaggctcatatgggatagagatattgtccacttttaccgttttagtcactttaggcttttgaccatcagagataataatagttactttatctccctcttttaatggtgtacctggttttggaaattgcgaaattacaagtcctttttcgactgtatctgaatactctcgttttatatctgacgttagttttctctcattcaaataaccagttacactattttcagtccaccccgaaaagtcacctggtctaatttgataaggccctttacttacccagattttcagttcttgctccgcttctataaccatctgatcaggcgtcggaatttgttctacaatttcacctttcggcttatcattttcaatataatttaccgtaacttgtttatatttttcttctaactcagcttttacactctcaaagttttgacctgtgaaatttgccatcttacttttcttttttccacctgattgatagatagtaattttagcgttttcttttacgactcttcctgctacagggtccgtttttattacatccccaacttcaacatcatctgtatatacaatattaggctccgtcacctcaaagcccttttctactaatgtatttacagctgtcgtgtatttcataccagccacatcaggaactttcacatctttcggaataaataatcctggaataaccgtaagtgctaatgttattcctattgctaaaaataaaaatgttgaaattaaaactttaagccacttgttactccgttttttcttcttatctaactcagctgcttctgctcttatcggttcttccaccttactcccttttaaaacaatcgtttcatcacttacattttcaaataattgttcttgttgaataatcggaatcgctttcgtcgcttccatatcttccggtatgtaaaatggttgctcatttatcctctctggatatagcgcagtttcaatatctcgcttcatcgcattggcagattgatatcggtgaaacggatcttttgcagttgcctttaatataatattttcaacactttgcggaatattttcattccatctttttggtgatgggatttcactttgtaaatgttttaaagctatagcaacagcagattcgccagaaaacggttgtcttcctgttaacaattcaaacataactattccaagagaatagatatctgattgtttatttgctatcccgccacgtgcctgttctggtgataaataatggactgaaccaagcactgaatttgtatgtgtaattgttgttgcacttgtagctgtcgcaattccaaaatctgttacttttattattccatcagctcgaattaaaatattgtgcggctttatatcacgatgcacaatttcaaaatgatgggcatgtgccatagcggatgttaactgctccataatatcaagagcttctcctataggtaacatccctcgctcaattatgtattgcttcaatgtttgccctggtacatattccatgacaagatagtatataccatcttcttctccgacatcatacatattcacaatatttggatgcgacaacgttgtaacagactgcgcttctcgatggaaacgtttaataaactcttcgttatttgagtagtcgagtcttaatatttttaccgctacatctcggccaagtatatcatcatgagctaaatatacattggccattccgccaccaccaatcattttcagcagcttataacggtcatttaagcgttttccaatcagcacgttgcacttcacctactttcgtttgtcgaacccgcataatcaataagaacaagtgtgatattatcttctccaccgcgatcatttgccaattgaatgagacactgccctttaccttcaagctgttcatttaactgtaaaatttgtcgcatatcatcaatagaaactttgtttgataacccatcagagcaaagaagtaattgatcatcttcctcaatcaccaacgttttaacatctaacccaactttttcttctgttcctaatgctcttaataacacattctttttcggatgatactctgcgtcttcctttgaaatttcaccatgtttcacaagctcatttacaagtgaatgatcttccgttactagcgtcatttctccttctgataccatatagcaacgactatctcctatatgccctattgtcacaaagcttggtgtacaaacagctattataagcgttgttcccataccattacattctgcattttgctgagcgtattcatatatacgctcattaataatcccaacactagtatgtaaccattgttctacttttttcggctcattcatattatgtgtttgcttccaataatcatggaataattgaatggccatcgagctagctacatcaccagctcgatgacctcccattccatctgctactaccgctaatacatttccatctaaattgtgaaaaactcctgcactatcttcattatgttgacgaacttttcctttatccgatagaaatacggctttcatctcgtcacctcgtctcttctttgcgctccttcgcacgcaactgaccgcaggctgcatcaatatcatgaccttgttcacggcgaatcgttacattcactccacgatcttttaacgttttctcgaacaagaaaatttgttcacgtggcgtacgtacataatcacgttcaggtacgtagtttaccggaatcaagttcacatgacattttacaccttttaagagcgcagcaagctcttcagcatgctctacttggtcattttctcctccaaataatccatattcaaaagtaatacgacgccctgttctatttacatagtatttaatagcttccattaaatctggtaatttataagcacggttaatcggcattaattttgaacgtaattctgagtttggagcatgcaatgaaatcgcaaaattaatttgtagatcttcttcagcaaacttataaattttcgggataattccactcgtcgaaacagtcatatgtctcgcaccaatatgaagtcctttttcatggttaatgatgcgtaagaatcccattaaattatcatagttatcaaatggttctccaatccccataacaacaagagaacttacacgttcttccgtttcatcaagcgcacgctgaacttctactacttgcgctacgatttctccagcttctaggtttcgctttaatccaccaagtgtcgaagcacagaacgtacacccaatacgacaaccaacttgcgttgttacacaaatggaatttccatattcgtgtcgcattaataccgtttcaatagaatatccgtcatataattggaataagaatttaattgttccatccgaagacgtttgttttactaacgtgtttaaagtagtaatatcaaaggaattcgacaatttatcacgcaatcctttagaaaggtttgacatatcctcataattttttacacgttttttatataaccaatcaaaaatttgtccagcacggaacttcggttctccttgttcctttaaccaatcttgcatttcatgaagttgtaaagagtaaattgatggtttcttcgtttctaaatttttcttttgttttcttacagtcgtttccatgatgctacaccttcttccttaaacaagcaatataaaagccatccgtcgcaaaataatgcggtaaaatttgtacttgaccttcatcaatatacggagttaatttttctggcatacgctctttaagcgtagtatcccattcaaattcaggatgttcttgtaaaaatttctctattacttgttcattttctattttctcaattgtgcacgtactataaacaagacgaccgccttgttttaataatggtgctattttttctagtattgcaatttgaatcgtcgataatctttcactatcgcctttatcttttcctaacttaatatcaggcttacgtctaattacaccaaatccagaacacggtgcatctaccaatattttatcaaacgtttcatttgcaaagtgctcttgcacttttctagcatctagcgctttagtttcgacattttctagaccaagtcgctctgcttgctgtttaattaaacgtactttgtgtgcatgtaaatcaagggacatgaccttaccagttccctttaatcgttccgcgatatgcgttgtttttccgcctggagcagcacaactatcaagaactgcatctcccgtattcggttctaaagcgcgtgctacaagcatagaactttcatcttgaatagaaagaaatccttttttaaacgcttctgtatgcgctacatttcctctttcaatctgaattgcatcatctgataagtcaccactttttgcttctataccttcacttgccaacaactcaatcgcttcttctaccgttaccttatcaacattcacacgcgctgttggtacagggggtaacatgtttacttcgcacattttttctgcagtttctaaaccgtattctgaagtccactcttggacaagccaaactggatgacttgttgtaattgcaagacgttctactggatccttgatttcatctacagaaggtacaccttctctctgaatcgaacgtaatacaccgttcaccataccagcaattcctttatgcccgcgacgctttgcaatctcaaccgcttcatgaatagccgctctttctggcactcggtctaaataaatcatttgatataaagataagcgaagcaatactcttacccacgcctcaaccttcttttttaaaaaaggctgtaaataataatctaatgtgtcacgacgttgaatcgttccatatacaatttcagttaataaaccaatatcttttctatcaattgcacttttttcaattagattatttaaaagtaagttgctatatgcaccacttttttccacttgaattaaaccatcaagagctaattcacgaacattttgtctcatgcattttctcctaacttcgttccaatttcaggttttgttccacgtaaaaattgtgaacaactcatacgctttttaccagaaggttgcaattcagtaattttaacacctgtttcattactcgttgctacaacaaaaccatcttcttcgattgcaacaatcgtacctgcttcagccggttcagttataggcactttttctccccaccatactttaacaacttgtcccgctaaagttgtataagcaactggccatggattcaatccgcgaatgtgattgtatacttcttcacctgtttttgtccaatcaattttctcttgctcacgttttatattgtacgcaaacgttacttcttcttcgttttgtttaatcggttctaacttaccttggattaataaaggtactgttttagatagaaggtgtgctcctgcttcacttaatttatcaaataatgagcctgtcgtttcacgctcttcaatttcaacttccacttgcgttaagatatcaccagcatccaatttttctaccatatacataattgtaatacctgttttttctttaccttccataattgcataatgaattggtgcaccaccacgaagttcaggaagtaaagaagcgtgaacattaatacatccatacttcggtgcttctaaaatttcatttggtacaatctgcccaaatgcagctgttacaattaaatctggctctaatgccaatactttttcatattcatctttttcacgaatttttaacggctgtaacacagggataccatgtttttccgcttcaactttaacaggtgtaggtgttaatactttttttctacctactggacgatcaggttgcgtcacaacacctactacctcatagccatcttcaataagacgacgaagcaccggcactgaaaagtccggtgttcccataaacactacttttatcatttaaaaaccgctccttttaacacctattctagttcgttttcttcataatatcttgtcactttcgatgtaaataaaacaccgtgtaaatgatcaatttcatgttgaattgcacgcgctaaaaatccttccgcttctaataagaatactttcccacggcgattttgcgctcttactttaatataatcggcacgttctacttcaccataaagtcccgggaagcttaaacagccttcgggacctacttgttcaccacgtttttctaatattgatggattgattaactcgattttcccagtatcatcatcgacatcaacaaccgctacttgcaagcttacacctacttgaggcgcagctaaaccgactccgtccgcaattaacattgtttcatgcatatctttcaacaatttcactaactttttatcaaagttaattactctttcgcatggtgtttctaacacttcatttggatgctttattatttctaaaactgccatatttccctccgctacattaacattgttggattaaaatcaattgagatttgtagctctttttgcatttctgcttgataatgttcatttaccattttgagcacgttctttaagtttggttcccgtttgtattttatcatgcattgataacgatatctatcttttatccttggaatcgctgaagcaactggtcctagcaccattgtttgctgtgagcaatgcgttcgtaaatacgaggcaattttttccgtcacttgtaccgcttttaataattcaggatgagatacagttacgagtacaacatagtaatatgggggatattgtcttgttcgtctcatttgcatttcttggtcaaaaaacacatcatattgttggttcttcgctaactctatactgtaatgttctggcgtatacgtttgaatcacaacttcccctggcaattcatgtctacccgctcgtccacttacttgcgtcaatagctgatatgtcttttcactcgcccgaaaatcaggtaagtgaagcatcgtatctgcagttaacaccccaacgagcgttactttcggaaaatctaatcctttagcaatcatttgtgttccgagtaatatatctgctttttcttccccgaacgcctttaataatttttcatgcattccttttcgacttgtcgtatctacatccattcgaatgactcgtgcctctggaaatagttttgtaatttcttcttctaccttttgtgtacctgtaccaaagaaacgaatgtatgtactttgacaagctggacactcagttggcatattctcttcgtaactacaataatgacattttaaacgatgattcattttatgatatgtcaatgaaatatcacaatgcggacattgaacaacatacccacaatcacggcacataacaaatgtagaatgacctcttctatttaaaaagagtaccatttgttctttcttttctaatcgatctgctattttttcatgcagcgccttagaaaacattgatcgattcccgtcacgaagttcttctcgcatgtcaacaatctctaccgttggtaaagcttgttcattcatacgtttttccattgttaatagttcataaacaccttttttcgcccttgcaaacgattcaagtgttggtgtcgcactaccaagaacgataggacatttatgatattgtcctctccagacagctacatctcttgcatgatacctcggattatcttcttgtttgtaacttgattcatgctcttcatcaataataataatccctaaattctcaaaaggcgcaaaaacagctgaacgcgcaccaactacaactttcacttcttttcttaaaatcttacgccactcgtcatacttttctccaacagacaacgcactatgaagaactgcaacttgtgagccaaacctacctttaaaacgatccaccatttggggcgttagtgcaatttcaggaacaagaacgatagcttcttttcctttcttgagcactgctgctatagattgtaaatatacttctgtctttccacttcctgtaacaccatatagtaaaaatggattataagtttcatttgtaattgatgataaaatcggtgtaataacttgtttttgttcctccgtaagtggaaatggttttgtttgttcaaaatcatcatcgtcatacggatttcggtatacttccacatacttttctgaaatgaatccctttttaacaagtgcttttattggagcatctgttatttgtaactcttctgtaattactttcaacggtgcacttttataattttccacaaaataataaagtacatcttgttgttttttacttttcagttcaaatgccgctaattccaatttatcttctggcaactccggctgaaccactctttgcttcttcttttgtactttatctttcacttgataaacgacttcaaccgtaccatttttaatttcttgttgaatagttcggtataaatgtggctgttgctcgattacttcaaaatcaattgcttctttatcctgaaataaatatagtatttcaggtgctatttcttcctgtttacaaagttgtagacgttttttatacgttgcttttatcgcagttggaagcatcacttgaaaagctgaaatcatgtagcataacgtttcacttgtaagccaatatccaagctttaataattcatcatttaaaaccggtgttacatctaatatttcatggattgtctttaacttcttactttctacatccaccgaatctttaatcccaataataaaaccttgcaattttcttgggccaaacggaactactacacgcattcctgtctgtacaatatcttcccattttttagggataatgtaatcaaatggtcgatctgtctgacgggcaggtacatcaacaattacacttgcaaatttcataaacgatcatcttctaacatcatttcaatttgcttcaatatttcacgagctacctcttttttcattaaaattggcaactcaataacttttccatcttttctatacattgttacaatattcgtatccgtgccaaatccagctccttgcgcttttacatcattcgcgacaatcatatctgcatttttctcacgtagttttttcgttgcatattcctctacatttgtcgtttcagcagcaaaaccgataagtaactgtttatcctttttctgacctaacgtttttaaaatatccaccgttctttcaagttcaatgacagcatcaccattttgctttttcattttattctcatgaacatatttcggacgataatctgcaactgctgctgttttaatgacaacgtctacgttttgataatgttgaagaaccgcttctaacatatcttgtgcagattccacttgcactgtcgttacatgtaacggtgtatttaatgctgtcggtcctgaaacgagtataacatcagcgcctaaattcgctgccacttccgcaatcgcataccccatttttccagaagaaaaatttgtcataaaacgaactggatcaaccttttcacgtgttgggccagcagttattaatattctttttccctgcaatggtttgtgttctgagaaagcttcctctaaccgtgcaataattgcttcaggttcttctagtcgtcccttcgccacatatccacatgctaaaaagccttccccaggctcaataaatgtatatcctagcgttttcaatgtcatcatatttttttgaactattttattttcatacatatgcacattcatagcaggcgcaatccataccggagctgtagtagctaacaaagtagttgtaatcatatcatctgcaataccaccagctaactttccaatacaattggcagtagcaggtgcgacaagtacaacatccgcccaatctgctaaatcaatatgagcaataacagctgagtctttctcatcaaatgtatccgtatatacatcatggcgagaaagcgcttggaatgtaagaggcgtaacaaacttcattgccgactcactcatcattacttttacaatcgcgccagattgtgtcaatttactcgttaacgcagctgctttaaaaaccgcaatgcctcctgttacacatagaagtatctttttcccttttagcatatgactcgtcctctttctttttcaaacttataatactgaaatagaattctcagctcgtcagtaccaatatttcattcctttcgtaaaaaaataacaacctacttgtaaataggttgttaccgttacatagaaaattataaagtctatgttttattttgtcgaaggcaaaggcttattcagctactttatcttcacttggtacgtagcttaatgcttctgcatcgatttcttctaatgctttacctacacatttatgagaaacaggtttttctacaacacagttattagcaagttgcatttcacgcgcgcgttttgcagctactgttactaatgtgtacttagaatcgattttttgtagtaatgagtcaattgatggatttaacataattatagaccctccgtcatttctttataatattttgctaccctttcgcggcggcaatgttcgccaaccacaattgctttaattctatcacaagctaattcaacttgatcgttttctactacatagtcgtaagcgtccatcatctcgatttcttctttcgctacagttaaacgattttcaataacatcttcagtctctgtaccacgtccgacaatacggctctttagttcagataaacttggaggtgctaagaaaataaatacaccttctgggaaagctttcttaacttgaattgctccttgcacttcaatttctaagaatacatcttttccttcttgtaatgttttttcaacatagtcaatcggtgttccgtaataattacctacgaactcagcccactcaagtaatttttcattacgaatcatttcctcgaattcttctctttctttaaagaaataatccacaccatctacttcaccttcacgcggcttacgtgtcgttactgaaatagagtactgaaaacgtgtatcctcatggctaaacagctctttacgaaccgtcccttttccaaccccagaaggccctgaaagaacgatgagcaatcctcttctacttctcataaatatgtaaaacctacccttcctcacttaaatcttctttattattcaaacgatgtgcaatcgtctctggttgaattggacttaatacaacatgcccatcatccataacaataaccgcccttgtttttctcccatacgtagcatcaagcaaagcattatgttcgcgtgcttcctgtactgttcgtttaataggagctgactccggacttacaatagcaataattcgatgagcagatacaatatttccgtatccaatatttaaaaaccgcatggccatagtttgcgcctcctagtaagtctatccgatttctccaccacgtataactttatatattttttgaaagctactcaatattttgtacttgttcacgaattttttcaaggttatttttcatttctacaacatattttgaaattgttaagtcatttgccttagaaccaatcgtattaatttctctatgcatctcttgcacgatgaaatccattttccttccaacaggctcttcaatctgcaatgtttcacgaaattgctctaaatgactttgcaaacgaactaactcttcatgaatatcacaacgctctgcaaagattgcgacttctgttagcaatctttgttcatctagatcttgattatgtaattcttttaagcgattttctaatcgttcacgatatttttgtgtaacaattggtgcatgtggaataattgcatttacacaattgctaatctcttgtaaacgatacgctatatctttatgtaatcgttctccttcgccatctctcatcgttttcaacatatgagcagcttgacgaacagcctcatataaactgttctcaaaatgctcatttacattttctatttcttcaattgctgttacttctggcattgccattaattgctgaagtgtaatagaatcttgtaattgaaatttcccttttatatcttccatcatcgattggtactgctcaagaagtgaccaattcacacttaattttctttcaacaagtccttcacccgctatactaatagacacttcaatgcgtccacgtcgaacttgctgtgcaattattttacgaattttgtcctcaaataccatcatttgcttaggaagtcgaatactcatctctaaaaaacggtggttcaccgatttcatttctactgtaatttgaaaagtatcactttctactttcgatcttccaaaccctgtcatactagaaatcatttttatcacatccaagccataaaataactcaatgaaaaaggtaatagagacaaggctctactaccttctgtaaattatatcacattttcataacattgactatttcaagtttaatcccttcttatataatatcggctttttcttcttagcctttttccctgttaataaagaacctactagtaagaaagtcggaattgatgacaaacctccaattaataaccaatctcttgcttgtatcggcattgtgctaaagattggttgtaacggtggataatatataaccactagcatgagtagtaacgaaataataaccgcccctactaaatacacgttcccaaatggattacggtgaaagacagaatgctcactacgacaatcaaatacatgaataagctgagcaagtaccaacgtcgcgaacgctacagtttgtgcatatttcagttcatttggatgttggttatacgcaataataaacgccactaacgtcactgctccaattaaaaaccctcgacttattattttccacgcaagccctctagcgaataccccttctttcgggtgacgcggtgttctcttcatcacatctccttcagccttatccaaacctaatgccatcgctggtaaaccatcagtaactaagttcacccataaaatttgaataggaaccatcggcagtggtaatgcaagtaacatcgcaaataacataactaaaatttctccaacatttgacgccaataagtagcgaatgaacttacgtatgttctcatatatatttcttccttctttaattgctgatttaattgtagcaaaattatcgtctagtaaaacaagtgaagaggcttctttcgcaacatctgtccctgtaattcccatcgctatcccaatatccgctgtttttatcgctggagcatcgttcactccatcacctgtcatcgctactatatgtccttgattttgcagtgccttaacaattttcaatttatgctcaggtgatacacgagcgaatacatacgtatcttctacaacattttctaattcctccacatccatattcgcgagttctactccttcaacaacgcgtccatctggtggtaaaactcctaattgttcagcaatcgccattgctgtcactttatgatcacctgtaatcattactgttcgaataccagcttctttacactcttttaccgcctgcgccacttctggccttggcgggtcaatcataccttgtattccaaccaacataaaatctttttcaacgtctctttcatgttcaatagaatccgtgacttttaaaggtttaaacgcaactgcaattgttcgaagcgcttgactacctaagctatgaatagccgcctgtacttcttttctatatagctcacttaacggctgctgcttatccccccataagattgtttgactcagttgcaaaagaacatccggtgctcctttcgtaacaataaactttttcccctctcgatctcgtacaataacactcatcatttttcgagttgaatcaaaggggaattcacgaataattttaaatttcccttttaatgcctcacgtgttatcccagctttcattgctgcagctacaagcgctccctctgtcggatctccatctaatacgtacgcctttttcttttgaataatatttgcattgttacatagtgaaccaaatgtaagtagctgataaagtgattttgtcttagctggattcacttctttttcacctttcataaaagagccattaggttcatatccttgccctgtcactttccacaattctccgcctgaccacatatgtgttaccatcattttgttttgcgtcattgttcccgttttatcagagcatataacagaagcgcagcctaacgtttctacggccggtaacttccttacaattgctctcttttttatcatacgctgtacaccaagtgataaagctactgtaacaattgctggcaatccttctggaatagccgcaacagctagcgatacgccagctaaaaacatatgatatacttcattcccttgatacacaccagccaatacaacgagcgctgtcaaaataagagctacaataattaatatttttccgagctgttctaaccttctttgcagtggcgtttccatttgctctgcattttgcaacatatttgcaatttgccccatcgctgtattcataccagttgctacaacaactcctgtaccagatcctcgcgtaatcattgtccccataaaagccatatttttttgatccccaattgcaacatcttgcccttgcaatgcttctaccttcttttgtacaggtacggactcccctgtcaaagcagactcttcaatatataaacttgatgcctcaacaagacgcacatcagccccaatacgatcaccactggaaaacttaataatatctcctaaaacaagtgctttagatggtgcttttacccactttccattccgcattacagtaacttgtggagcggctagttcctttaaagcttccaatgatttttcagcttttctttcttgaaaaaagccgagaataccattgataataacaatggcaacaatagcaatagaatcaatgtattcacctaaaaacgcagaaacaattgttgctccaaacaaaacgagtaccatgaaatctttaaactgtgctaaaaataccattagtgcagaaggcctttttgcttcttctaattcattagtaccaaatttctttactcgcccttctgcttctttctctgtaagtccaacctttacattcgtattcgttctttcttccacttcatgtgctcgcattccataccagttcatcctgctatcgacctcctgattccagacatactctattgaaagcttattcagcctcgtccaaaaaaatgctataattaacatttagttagaaaggagtgttcatttatggcattcgatggattatttacaagagcgattacacatgaaattgaaaattctctttacacaggaagaatttccaaaatatatcaaccttcaaaatacgagattttattacatattcgagcgaatggaaagaaccaaaaactaattctttcatctcatcctacatatgcgcgtatgcacttaacgaatcaaaactacgattcgccagcaataccgccgatgttctgtatgcttcttcgcaaacatttagaaggtggatttattgaaaaaattgaacaaatcgacttagaacgcattattcaaattacagttcgcagtcgtaatgaaatcggagacgaatcattaaaaacattagtaattgaaataatgggacgacatagtaacattatcttattagatacgaaaacaaacgtgattttagatagcttaaaacacgtttcattagccgtaaaccgtcaccgaactgtatatgctggtgctgagtacgtcgcgccaccagcccaacataaaatcaatcctctgcaaattgaaaccgcagatgattttattagaccgctagactttctatctggaaatatggataaacaactcgtcggtgctttcatgggaatatccccattatttgcaaaagaagtagtaaagaaagccggtatggcaaacgagaaagcattatcagaagcatttttctctatacaaacaccattactatctcatgcatatacacctacaatgattactgcaaatggaaaagaattcttttatcttttccctcttacacacttgcaaggagaagaaaaaacattctcatcagtgagcgaattgttagatcgtttcttctttggcaaagcagaacgtgatcgtgtaaaacaacaagctcatgatttagaacgctttatgcaaaacgaaaaaaataaaaacgagaaaaaactcattaaactcgaaaaaacactgcaagatgctggaaaagcagataaatatcaactatttggagagctacttacagccaatatgtacgctttaaaaaagggcgataaagatattgaggtcgttaattattacgatgagaatggtggaactgtaaaaattacattagatcctttaaaaacaccatctgaaaatgcacaacgctatttccaaaagtatcaaaaagcaaaaaattcagttgttgttgtagaagaacaaatcgaaaaaacaaatgaagaaattctttattttgatagcttacttcaacaaatggaagctgcttcttcaaaagatattgaagaaattcgtgaggaattagctgaagaaggttatgtgcgcaatcgcaaaacgaaaaacgcaaagaaaaagcctactaaaccagtattagataaatatgtagcaagtgatggcacagagattttcgttggtaaaaacaataaacaaaatgattatttaacaacgaagtttgcccgccgtgatgaaatttggttacatacgaaagacatacctggctctcacgttgtcattcgttctttagagcctgctgaagaaactttactagaagctgccaaaattgctgcctattacagcaaagcgaaagagtctagctctgtacctgttgatttcaccaaaatacgccatgtcaaaaaaccgagtggtgcaaaacttggttttgttacgtacgacaatcagcaaaccgtatatgtaacaccagatgctgatattgtaatgaaattaaaagcgtaaataaaaaatgcgttgcttgtatgcagcgcattttttatatgttttcaatttcgttgctatattcattcaatattgtcaaaaaaattgacagtatcatttcacatttgtataaaattttttacagcatgtaaataaagtacaagtgtaactccaatcattatttttccccatccccctgctattcattgaagcaatctagattttatgaacaaaccgcctcccacaaattacgggctatttttttatctcccctaaaatatatgttgtccctactatcctttcttcaaatatacattttggcacgctatttgctttattcaatactgtgaataggaggaattaacatgactttaaaaattaataaaatccaaaatcaattacaaaactatgaaattgacgggttacttattaccaaaaaagaaaaccgccaatatgcaacaggctttacaggtagtgctggcgtcgtcttaatctctgccgatcaagctgtttttatcactgatttccgctatgtagatcaagcgaaatcacaaataaaagatgctgaaattattatgcataaaggaaatttagaaaaagaaattgcacatcaagtatcgaaattaaacattcaaaaacttggaattgaagaaaacaacatgacattgcaacaatataaaaacttgcaaaaatacgtacaggcggaaatgattcaagtgtgcgaaattatcgaaaatattcgtatcattaaagacacgcctgaaatagaaacaatgaaaattgcagctaatatcgcggacgaagcatttcaccacattcttacgtttctaaaaccaggaataagtgaaaatgctgtacgagatgaattagaatttttcatgcgaaaaaaaggggctacatcttcttcattccaaatcattgtagcctcaggcgttcgttcttcacttccccatggagttgcatcaaataaaataatcgaacgaggggatatcgttacattagacttcggtgcactttacgacggatattgttccgatataacacgtactgtagcaataggggaaccatcggaagaattcaaaaaaatatacaatgttgtacgagaagcgttaaaacgtgggactgaagcgattaagcctggagaaactgcgaaaagtatcgatgatataacgagggattacattacagaacatggatacggtcaatactttggccactctactgggcacggtcttgggttagaaatacatgaaccgcttcgcctatcccaagaaagtaaggtaactttacaagaaggtatggttgttacagttgagccgggcatttacataccgaactggggcggttgtagaattgaagacgatatcgtcattacaaaagaaggctatgaagttattacaaaatcaaatcgggaactaattgttattccttgttgaaatcatagaaaaaaatgccaccgaataaggtggcattttcttttattcattaacgaataacttttcgtttacttttttaacgattaccactaccgacattaatatacatattaaatacagcattttcgcaataaataaccacccttgaaacattacaattccatctattatctcatttcctttcaatagaaaaaacggaattgtgctaataataatgacaaactcgatactgaaaacaaatttcttttttcggctatatgctttccattcattccaacgatacatagatgcaaaaatcaatactcctatacataatatagctggtacccagtcactgttaaggaattgtcctgaaataactgataatagtaaacaaacgagcacaccataatatcctattttctctctcattcgtactcccccattctacttctcctttaatacgtaacttgctatgcttataataattcttagaaaaataacagctataattacaatataaagaccttttgcagacgacatccattcttgaaaaatagacgttttctctatttgtttctgcccttctattaaaataaaccctacgaaaaatgagcaaacaacaatgacacctatcataattccgatacttttcttactatattgtttcatatcatcccagttatataacagtataaaaacaaagccgaaaacaggtatgatactgatccattcattgtttgtaaacaaatttaaagtgattaatagactacaagatatggtaaatccccaaaacccaatttttttgcgcataagttctccttaaattccatttttaggattatttgtattgtaacatccatttatctttcttaccattacagtacatgaaatttcattttttctttttcctatactcacatactttcactgctttcatacaatacactacacgaatgcctaaaggatgtgaatgttatgggagttgaattaacgctattacacgctctctacattatttgtttactcactattattaccttttttattctccgaaaagatacgactatcatttgtatcgtttttatctttttattagcattaactgcaacaagttctatccctcttgccattagcggaatttttcaaagtttcatttacgccattactgagctattaccaactatattaatcatctccattatcgtatcaatgagcaatttactcgttcatactggcataaatgatacgatgatttcaccatttacaaaaatgattcgtacacctacactcgcctactggattatcggccttttaatgatgaccatttctttcttcttttggccttctccagctgtcgccttaatgggagctattttattaccggttgctgtacgtgtcggccttcctccaattggggttgcaattgctatgaacttatttggacacggcatcgccttatctggagacttcgttattcaaggtgcaccgaaattaactgcagacgcggctggtctccctgtttccagcatcgtatctgcaagtgttccactcgttatcgttatgggcattgtgacaacttctgtcgcttttttcttcttacgaaaagagtttcatacaggcttatctatacaagaagctattccatcaactgagtcttctaaaacgctcacttcattatcttctcgcataaaaaaatggctcgctatttgtatccctatcatatatatcattgatatcctttgcatgattcaatttaaattacaaggaagcgacgcaactgcacttatcggcggaacgactgttattatgattatcatcatttccctcatcgcctacaaaggaaatggactgaataaaacgaccgattatttcatagaagggctccaatttggctttaaaattttcggaccagttattcctatcgctgcactcttttatttaggagatagtggatttgtaaaaattatcggggactatttaccgaaaggttcacacggaatcattaacgacttaggcatcgctttatctcaaactgttcctttaaatcaatatgtatcggcagggacattaaccatcgttggtgtcattaccggcttagatggatcaggtttttcaggtatatcacttgctggttccattgccaatctttttggaacagcacttggccatggaacagctacattaacagcactcgggcaaattgcagctatatggaccgggggcgggacgttaattccttgggcacttattcctgctgctgcgatttgtaaagtcgatccatttgaacttgcacgccgaaactttttaccggttgttatcggtttaattgtcaccacgatcgttgcgatgtttatcctataacgtaagcaagtgttctcttgcttacgttttttgcttgtaaaattcatcatgaattatcagttttcaagagggattcgttattacttagcgaaattatattaggagagtaattatttcaaaacgtttacgagaaacagattactgcaattagaaaaggggacatacctatgaatgaattgattttcgtcttattaatttgtccattacttatctttatcgtttctgttattggaacgcgcaagacgaaaacgtattacgtaatgccgattgtaacgtttgctagttttttaataataggtgttatcgcctttactccaaaatttttcttttgggttggcatgtacagcatcttctcatttattgtttcttatatgactttattgtttttaagaggatatgagcttgcagaaagcgctaagtagttaaggagattgtaatatgattttctttgatattgatggaactttacttgaagttttaacaatgatataaaaaacgaccgcgttcccccgcggtcgtcttttttcgtgttacgctgtgatccaagcttcgttagctggatttttacgccactcttgtaatttcttcgtttcagcttgtccaatcatacctttttctgctgcaacttcagttaatgtactgtaatcacttaaagaatatgatgctacgttagctgcttctagtttttcttttcctgcttcaagctcgtatgtgaagattgatacgatccctaatacttcacatccagcttcgcgaagtgcttctacacatgtaattgcactaccgccagttgaaattaagtcttctactactacgactttttgacctttttcagcttttccttcgatttggttccctttaccgtgaccttttgctttactacgtacgtagcacattggtaaatccatacgatcgcttacccatgcagcgtgcgcaataccagcagttgcagttcctgcaataatttctacagttgggaagtgctctttaattaactcttctaatccagctgcaatcgcttgacgtacttttggataagataaagttaaacggttatcacaataaattggcgatttcatacctgaagaccaagtgaatggatcattcggttgtaaaaatactgctccaatttctaataaatgcgatgcgatttcttttttcatactgttacaccttcccactgttgttttactgttttatacgcttcaagcggattttctgcttttgtaatactacgtccaactacaatgtagcttgagccaagttccctcgcacgtttcggtgtcgctacgcgcacttggtcatttacatcatcgcttgcaagacgaatccccggtgttaccgttacaaattcatttccgcatacttcacgtaattttggaacttcaagtgttgaacaaacaacgccatcaagtccactttctttcgttagttttgcataatgagcaaccgcttcttctaacgttttctcaatgccgatctcttttttcatcatagcttccgaagtgcttgttagttgtgtaactgcaatacaaatcggtctctcttttccttcttgcttaccttcctctaatccctcaatcgcagctttcatcatactgcttcccccagcagcatgaacatttaccatatcaacatctagactagctaggctacgcatagcgctttttaccgtatttggaatatcatgaagttttaaatctagaaagatcttatgccctttttcttttaagtacgtaataatcgcagggccttctttgtaaaataactccataccaactttgacaaataactcttccccttcaaagtggcgcaagaattgttctacatcttgtttccctggaaaatctaatgcaacgattaacgactgtgacatgtttgcttccagctccttccttgacattccgaaatgtgatcaaatcctaattcatctagtaatgctggtaactcttcaataattgtcggacatacgaacggatcaataaagttcgctgtacctactgcaactgcgcttgcgccagcatagaagaattcaattacatcttccgctgtctcaataccacccattccgataatcggaatgtttaccgcttggcttacttcatgtaccatacgaattgctactggcttaatcgcaggacctgataatccacctgtacagtttgctaaaattggtttagctgtttttaaatctagacgcataccaagcaatgtattaatcatcgttaaaccatctgcacctgcattttcaatcgcttttgcaatttccacaatgtttgccacgttcggtgacaacttcacgtatacaggtacttcagaaacctcttttactcgcttcgttaaatcagcagcaatttcaggatttgtaccaaaggcgataccacctgtttttacgttcggacaagaaatatttaattctagtgcatggacattaggcgctttagaaatttccttcgcaaccgctacgtaatcctcagcttgtgagcctgcaacgttcgcaataattggaaggtcaaattgttctaaccatggtaattccgaattcattactttgtctaatcccgggttttgaagtccgattgcatttagcatgccgcctggtgtttcagcaacacgaggcgtcggatttccataacgtggttgttctgtcgtcgctttaatcatgattgatcctagtacacttaaatcgtaaaactgtgcatattcacgaccaaacccaaagcatccagatgccggtataattggattttttaatgataatcctggtaattcaacttgcaatctgttcatagtacaacctccccgattggaaatactggtccgtcgctacacaccttcttgtaagaatgtccacttggatcttcttgtaagtggcatacacatgcgaaacaagctccaataccacagcccatacgttcttctaatgaaatataggcttttttctctttgtaacgtccttctaatgcacgaagcatcgctaacggaccacatgaataaagaatatcaaagtcaattccgtaattatcaattacatctgtgacaaatccttttgtaccgtgtgtaccgtctactgttgcaacgtacgtatcaccaagttctgcaaatttttcttcatagaaaactacatctttcgtttgaaagcctaagatgtgaataacacgtacaccttttgcaacgaggcgctgtgataattcataaagtggtggtacaccaattcccccgcctactagtaaagctgtttgaccagcttctgcttcttctacaggaaaaccgtgtcctaatggtcctagtacatctaccatttcaccttgttttctagttgctaatgtttttgtcccttgtccttcggcacgatatagcattgtaaattcgttcttctcttgatctacattacaaatactaattgggcggcgcagaaggggcgcaatgccctctgctaccttaatgtgtacaaactgccctggttcgttcatttgctgtactaacgttccttgaagcactaattcgtaaatattttttgcgatttctttttgattaacgacgatcatattttgcttttgcatcatgcatgtaccacctcgtgacgctttgtttgcgtaatttctttcattgaatgagctgagaatgtcatagattctaatactcgtaagattgctctcgttgtatcaagtgatgttaagcaagccacaccattttctactgattcacggcgaatgcggaaaccatcacgcgctggttgtttaccttttgttaatgtgttaattacaaactgtgcttttccttgacggataatatctagtaagttgtagtcttcagaatcaattttgtttacaacttgtactgggatattttgctcttctaatgattgtgctgttccagctgttgctaataagttatagccgatttcgtggaaacgttttgcaatttccatcgcttcttctttatctttatcagctacagtaatgattactgagccgtgcgttgggatgttaattccagaagcaactaatcctttatataatgctttttcaagcgttaagtctttacccattacttcccctgttgatttcatttcaggtcctaatgttgtatcaactgagcgtagtttcgcgaatgagaataccggagcttttacatatacttctttctcttctgggtgatagccagttccgtatccttgctctactaggtcttgccctaaaataactttcgttgcaacattcgccatcggtacgcctgtaattttacttaagaacggtactgtacggcttgcacgtggatttacttcaattacgtacacttgatctttgaatactacaaactggatatttagtaatccaacaatgtttaatccttttccaagtgcaattgtatgttcaatgatttgttcttttagtttttcagataaactttgtggtggatatactccaattgagtcaccagagtgaactccagcgcgttcaatatgttccataatacctggaatgaatacattctcaccatccgaaattgcatctacttcaatttctttaccaaccatgtaacggtcgattaatactgggtgatctgcatgaactttaactgcatttttcatgtagtgcagcagttcttcttgacgatatacgatttccattgcacgtccacctagtacgtaagatggtcttactaatactgggtaaccaatttcttctgcgattgctaccgcttgttctacagtcgttgctgttttaccaactggttgcgggatgccaagttttgttaaagcagcttcgaatttatcacgatcttctgcacggtctaagtcttcaagtgatgttcctaaaattttcacaccgtgttcttctagtttcgctgctaagttaattgccgtttgtccaccgaactgaacgataacaccttctggtttttctaaatcgataatgtgcattacatcttcaatcgttaatggttcaaagtataatttgtcagaaatactgaagtctgttgaaactgtttctgggttgttgttaatgataattgcttcatatccagcttctttaattgcccatactgagtgaactgttgcgtaatcaaactcaacaccttgaccaattcggatcggaccagatcctagaactactacactcttacgatctgttacaatcgattcattttcgtccgcatatgtgctgtagtaatatggcgttgcagattcaaactctgccgcacaagtatctaccattttgaatactggcatcatattattttctttacgcatatcgtaaatttcacgctccgttttgttccaagctgctgcaatgtagtgatcgctgaagcccatttcttttgcagtttgtagtacttctatatttcctacattcgcttttacttcacattccatatttacgatgttttcaactttttgtaagaagaagaagtccatttcacaccattcattgatttcttctttcgttacaccttggcgaattgcttctgctacaataaacagtcgttcatcatccgctttaatgatacgttttttcatcgtttctttatcaagttcttttaagtggtctaattctaagtgataaatgccaagctctaaagaacgaactgcttttagtaatgattcttctaagttacgtccgattgacataacttcaccagttgctttcatttgtgttccaagcgttctgttcgctgattcaaacttatcaaacggccaacgtggaatttttgaaacaacatagtctaacgctggctcgaagcaagcgtaagttttttgtgttactgggtttacaatttcatctaacgttaagccgactgcaatttttgctgctaatttcgcaattggatatccagttgctttagatgctagtgcagatgaacgacttacacgtggatttacttcgattacatagtattggaagctatatggatcaagcgcaagctgaacgttacatccaccttcaattcctagtgcacgaataattcgtaatgaagtgttacgtaacatttgatattcacggtcgcttagcgtttggctcggtgctactacaatcgaatcacctgtgtgaacaccaactggatcgatgttttccatgttacatactacaatcgcgttatcatttgaatcacgcattacttcatattcaatttccttacagccagcaatacttttctctaataaacattgtgttactggactatgttttaaaccacttgttacgatttcaattagctcttcttcgttatggcaaattcccccgcccgttcctcctaatgtgaacgctggtcgaacgattactggataaccaatttcatttacaaatccatatgcttcatcaaggttatgaataatttcacttggtggtgttggttcatttaaatcttgcattaatgtacggaataaatcacgatcttccgcttgctcgattgctgataattttgttcctaaaatttcaactccgcactcgtcaagtacgcctgattttgcaagttcaacagccatgtttaaacctgtttgaccacctaatgttggtaggattgcatcaggacgttctttacgaataatacggcttacgaattctaatgttaatggctcgatgtatactttatctgctgttgcagtatccgtcataattgttgctgggttagagttaacaaggattactttgtaaccttcctctttaagagattgacaagcttgtgtaccagagtagtcaaactccgctgcttgcccaattacaattggtcctgatccgattactaaaattgtgttaatgtctaggcgttttggcataactcttccccttctttcttgaagttttcaatcattgttaagaaatcttcgaataaatcatttgcatcttctggtcccgctgaagcttctggatggtattgtactgtaaatgctgggaacttcttatgacgaagaccttctaccgttccatcgtttaaagcaacatgtgtaatttcaagatctgtattttcaactgattcttcttctactgcgtatccgtgattttgagatgtaattgctacttttccagttgcaagattttttactggatggtttaaaccacggtgaccaaatttcaacttacttgtatttgcacctgatgctagagcgaacaattgatgtcctaggcaaattccgaataaaggaactttaccgataatgtcttttaacatttcaattgcttctgatacatctttcggatctccaggtccattacttaacataattccatctgggctaaggcgtaaaatttcttctgctgttgtgttgtaaggaactacaattacatcacagtcacgcttatttaattctcgtaaaataccatgtttcataccgaagtctactagtacaactcggtgaccacgacctgggcttgggtatggatctttcgttgatacgcgttttacatgatctgtaaatactgtcgcttttaattgacttacaatgtactctacatctgcatccatattacaaaggcgtccgcgtaatgtaccgtattgacgaatttttctcgttaattttctcgtatcaatccctgctaatcctgggatatttctttctttcaagtaatcatttaacgaaatttcattacggaagtttgatggatgatcacaaatttcgtttacgattaaaccatttacagatgggtgaatggattcaaaatcgtcacggttaatgccgtagtttccgattaatgggtacgtgaatgttacgatttgaccgcaatatgatggatcagataatgtttcttgatatccagtcattcctgttgtaaatacaacctcacctgacttttcgatttcgcctccgaaacctgttccaattaatactgttccatcttctaagataagttgtcttttcatactaatgcactctccttttgccatgcgatcttaccaccaacgattgtcattaccggccatccttggcatttccaacctgcgaatggtgtattttttccttttgataagaatgttgttgggtcaatctcttcttcttgttctaaatcaatgattgtaatatcagctgctctaccttcttttaggcgacctgcttctaagccgaatgtatcagctggcttttctgttaagaattgaattaactgttctagcgtaataactccctttttcacaaggtttgtgtatagaagcgggaatgctgtttcaaaaccagtaattccaaacggtgctctttcaattccttgtgctttctcttccgctgtatgcggtgcatggtcagttgcaatcatatcgatcgttccatctaataaaccttcaattaatgctgcatggtcttcttttccacgaagcggtgggttcattttaaagttaggatcagctgatgggatatcatcttcacataacactaggtgatgcggtgttacttctgctgttactttaattccagcgcgtttcgcatcacggattacacgtaccgaacctttcgtacttacatgacatacgtgatagtggcaatctgctgcttcagcaagcagtatatcccttgcaatatgtacagattcacatactgatgggataccgtttaatgcgtgtttctcagaaaacttcccttcatgtacacaacctttattaataagcgtattctcttcacagtgcgcaactactgccatatctaattttgctgcacgtttcatagccgctaacatcatgctcgcatcttgtacgcctacgccgtcatctgtgaaagcaaatgctccaagttcttttaatgtttcgaaatctgtcatttcagaaccagcttgacgtactgtaattgctccgtatggtagtacgttaacatgagctttttcttcaatacgtttttgcaagtcttccatatgttctctgcattctggtaccgggcgtgtatttggcattgcgcaaattgtagtgaatccaccttttgccgctgctagtgtacctgtttcaattgtttctttatgttcaccacctggttcacgaagatgtacgtgtacatctactaatccaggtgcgattaactttccgttcacatcgattacttcagcattatctgccgtaatattttctgctaccttagcgattttaccgtcttgtacgagaagatccgttgctacgatttttccttcttcattcatataacgaccatttttaaacaaataattcatgtttcattcctcctaatacatttggtaaggcgcgttttagtacagccattcttacgtaaactccattttccatttgtttaaatatgcgtgaacgctcacactcaacaagttcacttgcaatttcaacatcacggtttacaggagctggatgcataataatgcttccttctttcatacgcttttctctttctactgttaatccgtgtttctcatgatattctttcataatgtctgtttcataatgatcatgacgctcatgttgtacacggagtaacatcattacatcaacttctggaacaagttcatctaatggtttgtatgttccaaatgtgttgtcttcatctttccactcttctggacttgcaaagtaaattgttgcaccaagcttcgttaatgcttctgcattagaacgtgctactcggctatgacgaacatctcctactattgcaatcttcaaaccttcaaatcttccaaactcttgtttaattgtaagaagatcgagtaggcactgcgttgggtggtttccgcatccatctccagcgtttaagattggaatattcacctgatcttttagttcatcgaagtagcgatcttgctcgtggcggatgaccactgcttttgttccgattgattctagtgttcttatcgtatcgtataaagtttctcctttttgtacgctagatgcatcagctgaaaagtttaaaacatcaagtcctaatctcttctcagcaacttcaaagctaaatctcgttctcgtactattctcaaagaacaagttcgcaacaaaagtttgctctgtcgttttgctctcttttccattcgcaaaatcttctgcatcttttaggatttctgaaatttctacttccgataattcactcatcgttaacaaatggctcatcgtcatccctcatctttctgatttttatgttaccacttttgaatttttataacaacctttgcataaaaataccctagtcatgtgagactagggtgcaagaaagaagccaccctttccggtctcacaggactgaattaaaaggttattattatgaagcaatctgcttagattgttttatttgtttcgtttccggtagtagtagatttaacagtacacctacaattgctgctagtgccattccttctacttggaatgattctcctacgtgaagtaccgctccaccaataccgattactaatattactgatgcaatcattaagtttcgtttgtcacttaaatctgttttatcatctaccatcatgcgtaatccgcttgatgcgattacaccgaatagtaagattgatacaccacccataactggtgttgggatcgaatgaatcagtgcagaaatcttaccgataaacccgaacatgattgcgaatactgctgaaccgatgaataagtatacactgtatgctctcgtaattgctagcacaccgatgttttcaccatacgttgtattcggtggcccaccgattagtgacgcaattaatgttgctactccgtcaccgaagattgaacggtgtaaacctggtttttcaattaaatctcttttaataacatttccaagaacaatttgatgtccgatatgttctgatattgttactagtgcaactggtaccatcaagagtacaatcttccatgaaaactctggtgtatatgttacaaatggtactgtgaaatctggtacaacaaaccattttgcctcagctaccggctttaagtctactagcccttggaagtaagcgaagatatatccgccgataatgccaagtaacactggtattatactgaaaaatccttttccaaatatcgagcatataattgtaattgctaatgttactaatgctactgaaaagtgtgtaaagctatatttgccatccgcaccgttcatcgccatgttaactgctgtatgtgctaaagctagaccgattaccattactactggaccaactacgattggtggtagtaatttcataatccactctgatcctgatttcttaattccgagtgagattaagatgtacacaagtcctgctagcaaaccaccaagcattgctgctcccggtccacctgccgttttcgctgttataatcggtgcgataaaggcgaatgatgatcctagataggcaggtacttgacctttcgttataagaaggaacgctaacgttcctaatccacttgatattaatgctactgatggattcaatcctgttaaaaacggaacaagcactgttgatccaaacatcgcgaacaaatgttgtatacttaaaaataaccattttcccggtttcggtacttcattaacgtctaacactggcttttgttccattgttacatcctccttcagtttaaatctttgcaataaaaaaactctttgtgcctgtgcacaaagagtcctacactttcgtatgccaaatttgacatatgaaagccaagaccctttggcagcctcacaggactacatttaaaagggctttacttatcgtatatgcttactcgatcttgttgatctgtctcttgcaaatcaacttcgatacgctcttcacttgatgttggaatgttcttccctacataatcagcgcgaattggtaattcgcgatgacctctatcaacaagaaccgccaattggatttgagatggtctacctaaatccataagagcatccattgctgctcgaactgttcttcctgtatataatacgtcatccacaaggataactttcttcttcgtaatatctacagggatatcagaaccttttacaagtggttctttatttttcgattgtagtgttaaatcatcacgatataacgtaatgtctaactctccaacttccatttcttttccttcaatttgaccaattcgttctgccaaacgttgtgcaataaaaattccacgagttttaattccgacaagaacacaattatcgacacctttatttcgttccacgatttcatgactaattcgtgttaaagcgcggcgaatcatttggtcatctaaaacgacagctttctcttgcatgctctacacctccaagcttttttcttgcgtgagagtaatggtataaaaaaagtcctctcagcgtgtgcgagaggacttttgaaaaaagggtacaacataccctaagtatttcaaaccgttaccttctcaacctcacggggctgtgttaaaggatcattatttaactgttgtcagtatctcagttttcttatgatttgtcaatactattttcgtaaaatatttaatacgtcttcaaacacttctggaatcggtgcctcaaactgaatatattcaccagtacgaggatgatcaaagcctaaaatacccgcatgaagtgcttgtccattcatatctaacgttttcttcggaccatacttcggatctcctgcaagtggatagccaatatatttcatatgaacacgaatttggtgcgtacgtcccgtttctaagcgacattctacaagcgtaaagtctttaaagcgttctaacacttggaagtgcgtaacagcgttcttaccattttcatcaactgtcatactttgacgctctttcttatcacgagcaatcggagcatcaatcgttcccttatcatgcggaatcacaccgtgtacaatcgctttgtaacgtctcgttactgtttttgctacaagctgatttacaagcgattcatgtgccatatcatttttagcaaccattaatagtccagatgtatctttatcaatacgatgcacgatacctggacgcattacaccgttaatgcctgataagtctgtacaatggtgcataaggccgtttacaagtgtaccacttgtatgccctggtgctggatgtacaaccataccacgtggcttatttacaacaagcacatctgcatcttcataataaatttctaaatttaaatcctctggttgaatatctaactcttctggttcaggaattgttactgtaatttcatcttcttcttttactttataattcccttttaccgcttttccgtttactgtcacaacgtcatctttaatccattgctgcacttgcgtacgtgaccattcgttatttatccctgcaacgaatttatcaattcgctcgtttttttgctctgctgcaactgttacttgtactacttcactcattcaattactccttcgctttcttgccttctaataatgtttgaataataattaatacaacaccaatacataatgctgaatcagctatattgaatactggatagttgtacgagaaaatatacacgtgaatgaaatccactacttcttgtctaaatacacgatcaataaagttaccaattgccccgcccaaaattaggcttaacgaaatacctagaagcttgtctgttttcgcatactttttcatataaaatacaataaacactacaaaaacaactgtaataatgtagaagaaccacattttattttctaaaataccccaagcagcgcctctatttcgatgtgatgttatgtataatacattgtcgataatcggaatactcgtacccaattccatgttctttacaattaaccacttcgatatttgatcgatagcaatgacgaataacgctattacataatatatcattttcatttcccccacaaagacagtgtacctcaaaattttagcatagctgctaccttttcacaatgaacctttatagaagaataaaataaattaaaaaaaggtaatataatatcgttgtgcgtattcatacatttaccttttcgtagaagaattcatgaatcgtacgggcagtcggcattgtcttcatttgctttgtggaaattaatctccccgtctcttcacaaataccatacatgtctatttccattttaaataatgcgcgttctacatcctttaaatcctcttttatatcatgtaatagcaattttttctttatctcttccttaatttcatatccaagctcttggctgaactcgacatcatatttgtgcattacttctttagctagtctctcttgcaactcttttctcatcaattgcaattcttcttttatttccatgtaaatttcattcacgtgtacattcctcctagctgtaatgtacagttagtgtgtccgaaatttatttgcttacctcacacacatttttccttcacaggaaagagtctgaaagtgatcttgatataccatcaacaaaaaaactgaccgcatcaatagcagtcagttttttattattttacatagttttctttaacaactgttgcacaacgctcacataatgtttcatgttcagcatctttaccaattgtttctgaaactacccaacaacgttcacatgtttcaccagttgcttgaacaacaacaaccgctgtatgttcatacttcggtgcatctgctggcgcttcatccatcataccaccaagtttatactcagaaacgatgaataattgctttaagtcttcgctaatagactctaacatagctttcatttctgcagttggatatagcgtaatgcttgcatttaatgacttaccgattactttttcattacgagctacttctagtgcttttaacacgtcatcacgtaatgtcataaatgcatcccattttgtttttaacgcttccgcgtcatctaattgtacagcttctggcatatcagttaattgtacactttcttctgttacgcctggaatatatggccatacttcatcagctgtgtgcggtaagattggtgttacaagtttcgttaacgcaacaagaacatcatataatacagtttgaattgcacgacgatcttcgtggtttgcaccttcaatgtataagatgtcttttgcaaagtctaagtagaatgaacttaaatcaattgtacagaagttatgaattgcatgatacacagcagcgaaatcgtatgtctcatatgcttctttaacttttgtaattaagtcatttaattttactaacatgtaacgatctacttcacgaagttcagctacagctactgcattttcacttggcttaaagtcgtctaagtttcctaataagaaacggaatgtgttacggattttacgatacacttctgctacttgttttaaaatatcatctgaaatacgtacgtcagattgatagtcaacagaagatacccataagcgtaaaatgtctccgcctaattgatccatgattttcttcggtacgacgatgtttccaatcgacttactcattttacgtccttcaccatctagtacgaaaccgtggcttagtacgcctttatatggagctttacctgttacagcaactgctgttgataatgaagagttaaaccaaccacgatactggtcagatccttctaaatataaatcagctggacgctgtaaatcttcgcgctcttctaataccgcttggtgagaagaacctgaatcgaaccatacatccatgatgtctgtttctttacggaattcaccatttggactacctggatgtgtaaatccttctggtaatagatctttcgcttcacgctcgaaccatacgttagaaccgtgttcacggaataaatctgctacatggttaattgtttcatccgtaataattggatcaccattctcagcatagaataccggaattggcacaccccatgcacgctgacgagaaatacaccagtcaccacggtcacgaaccatattatgaagacgagtttctccccatgctggtacccattttgtttctgctacagcttctattaattctttacggaatgcttcaatagatgcaaaccactgtgctgtcgcacggaaaataattggttttttcgttctccaatcatgtgggtatgaatgtgtaatgaatgttagtttcagtaacgcgcctacttcttctaatttttctgtaattggtttgttagctttatcatagaataagccttcaaatccaggtgcctcatttgttaatacacctttatcatcgactgggcaaagtacttctaatccatactttttaccaacaacgaagtcatcttccccgtgtcctggtgctgtatgaacacaacctgtacctgcatctgttgttacgtgatctcctagcataactaatgaatcacgatcgtagaatggatgttttgcaactgtatactcaagttcgctaccttttactgttttcacaacttcagcattttcccactctaacgtttttgcaactgtctcaaacagctcagaagcaatgatatatttctcatcatttacttttacaatgctatattcaagctctggatgaacagaaatacctaagtttgcaggtaatgtccaaggtgttgttgtccaaatgatgtacttttcatcaccttctaatacgttctttccatcttttacagggaatgctacgtaaatagatgctgattttttatcttgatattcaatttcagcttctgctaaagcagattcactcgttggagaccagtaaactggtttttgacctttatagatataaccttttttcgccatgtcaccaaacactttaatttgttgtgcttcataagctggctctaaagtaatatatggattatcccaatctgcacgtacacctagacgcttaaattgctcacgttgacgttctacttgttcatatgcatactctgcacataacttacggaactcagcaactgtcatttctttacgttttacacctttatttgttaaagcttgttcaattggtaaaccgtgcgtatcccatcccggaacatatggcgcactaaaaccagtcattgatttataacgaacaataaagtcttttaatactttatttaatgcatgtcccatatgaatgtcaccattcgcatatggaggtccatcatgcaatacaaataaaggacgaccttttgtatgttcttgtactttttcgtaaatattcatttcagcccatttttcttgcattgcaggctcacgttttggtaaattcccacgcattgggaactctgtttttggcatcagtaatgtatttttgtactccatgctcaattcctccttacatgtataaaagaaatacttaaaaaacggaataaaaaagagaccttctcatccccaaaagggacgagaaagtctcccgcggtaccaccctagtagattctatacatatgtatagaatcctctttatattcttaacgcgaatacacgcctacgcttactctatttgttcagcgcggaactccagggtgatattcccactatctccttatcctgagcttacaccatcctcagttcgctatataaggtttgaaaaggtacttatccctatcttcgtttttcttaataaatatgttgtttaaaattatatgtaataatgagaaaaacgtcaagcttacactgtttcttcttttttcaacagttcatctacttcgtcttctaattcaattagtttatcccaatcatcgttgtttaacatctcaagctgtgtttctaataacatacggaaacgagttcggaatactttcgcttgtttctttagctcttcaatatcaaaagcaacttttcttgattttactaatgcttcgttaataatacgatcagcattcttttcagcttcacgcacaattaatttcgcttctttttgcgcattacgttttacttcttccgctgcttcttgtgcaacaacgatagatttgtttaacgtatcttcaatattagagaaatgatctaacttcccttctaactgcgcaactttttcttctaaagcttttttctcacgaatgaccaattcataatctttgataatttgatcaagaaactcatttacttgatcttcatcatagccacggaatccgcgaccaaattctttgttatgaatatctaatggtgttaacggcacaacgccacctccaagtagttatctaaatttcctctttcaattatatcttttcttcgacaaaataggaggatttccttctaaaaaaccaatcattttagtataccatacaaaattctccatttgtcgcgttttgttctaccttctacagaaaataatttacttcggccatatcctctaacagaaaaaacatctcctggataacattcataagaagtttgctccactgttttccaattgacttttactaaaccattttttatgaaaggttgtactttctgtctagataaatgtaacatttcagctaacataacatctaaacgaagtgaagaaaccgttccagatttctctccccacgtttcatgtatctgtagaatttgttctccttgcactgacgctaaagagacttttactttccctattgattgtaagttcatctcaatatacgatacaatttctttcgcaactacaatttgggcacgattttcttgcagcaaaatatcaccacatttttctcttgttaaaccaagagacataaatgtacctaatatttgcctatgttctagcgtataaaacttggaaggatagtcaatttctaatacttctacttgaaattcttcttcatttaattctagatagtctggataaataagtgctcttttacgctctgcattaggcgttgcaccaccaaattgcacagcaacatcaccttgtcctattaccatagaaacaatttgttgttgcctaggatcaagaaaatccgttaacttcacttgatggtactccgccgctcgcttccactctagcactttatccacaaagacctcctcatcaggcctaaaatgttcgtagatgctcatgtatttaccttcttactataagaaatagcttaataaactgaacaaaccagttttagcaagtttcaacgcaaagattgcaacgattggagaaatatcaatcattccaagcggcggaataaagcggcggaatggttctaaatacggttcacaaatacgtgccaggaactctccaaaagatgattcctttgcaccaggaaaccatgataggagaatgtaaataataagtgcccacgagtaaatctcgatagcataacttaacactataaaaactgttgtcatggcgtattaccacctctttatatttgtttcttcttcttcaccgaataactctgaaatcgcaccaacaatatctacattttcaggtgtacacataaatgttttcggccctattttttgaatgtccccgcctatagcgtatacagtaccacttaaaaagtcaacgatacgtaccgcttgatcagtagacattctctgcaaattaattacaacagctcgtctaccttttaagtggtccgcaatcccttgtgcttccgaatatgtgcgtggttctaataaaacaacttttgaagattgttttgctgtttcaatactcacaacattttgcttcggttgcgctttcggaaacgtaacgtcttgttgttctggtggatcttgctgctttttcatgtctgtttgctccttttcataaccatattgagctgcttctttttcttccggtgtatcaaaaaagaagtattttacttttgaccaactcataataagattctccttccttttacgcttttcctactaaaatcgttcccaaacgaatatatgtagccccttcttcaattgcaatcttgtaatcgttggacattcccattgataattctttacatggcgcatgtaataactctagctcctgcacctctgtttgcagcatacgtaattccttaaaacagcgtctgatttcttcctcttcttctgtaaatggagccatcgtcattagtccaaccacttcaattttatcgaattcttgcaaactttgaataaaagaaacaacctcttctattgccaatccttgcttcgattcttcagatgaggttttcacttgaataaagcatttcactttcttatcagcacgtttctgaatttctttcgccagtgaaagacgatctaacgaatgtaaataatcaatttcattaatgatttcttttacttttctcgtttgtaatgagccaataaagtgccaattaacttttgaaccgaaatgctcgtatttctgtaagaaaccttcatttctattttcacctaaatcgataactccagcttcaattacttcatttgttttttcaatccctacagtttttgtaactgcaacaagtttaatatcttgcaacgaacgtccagctcgagcgcaagattctttaatagcttcgtttacaatttctaaattttcttgtactgtcacttgctttcttcctccttaaaacctatgaaactcaacattcttcctgtcttaccttgatcacgacgatgagagaaaaatagttgctcttcacagcttgtacaaagagatgacattacaatatgctcttcttttatgcctgcttgtacacataatatacgattaatttcttttaaattaattgcgtactgcccgtcagaaattttttgatgaggaacagcacccctaactacttcctgtgctgctgttaatacacgatcatccacaacataacaacaagatccgatcgacggcccaattgcaacatgaatttcatcacttgaaataccttctgcattccacttttgaatcatttcctttgcaatctcttgtacagtgcctttccatccagcatgcgcaagtcctatcataccatgtgatggtgcataaaaatagagcggaacacaatccgcgtaacaagacgttaacagaacatcttcattactcgtataaatgccatctgtttttgaaatgccgtcctcatatgaatagacaccacttcccttttcctgttgccctactttttcaacatgatgagcatgaacttgttcagagcaaatccaattttctaatggtttttgtaacttatttgctaaaatgcgtctgttttcatgaacgttctccacgatatcattcacatgtaatcctaaattcatcgcatgaaaggagcccgtacttatcccaccatcttttgtcgtaaatccagcagtaatgtttccaagttctttccacgcttgtaaatacagtataccgtccacatatttaaatggttctctcataataaagcggctccttttaattaaaataacagaaaaaagcatggtacttcctgtctattttaccatacttttattttttcataatcctaacagaaaaaaaagaggaatttgtaatattctttatgaaattgtcggtgtttgtattgattctgttacagaattaacaggatttactcttacaagtatgacatcttccccaattttcacaatttccttccaaggaattacaatctcaacatcttttccaaaaatacctagcatacgtgtctgttttgaaataataacagaacaaattttccctgtgttcatatcaatttcaatatctccaatattcccaatcctttttccatctgaaatatttataacatccttcatctgtaactctgaaattcgtatcaccatttttatcctctcccttatatgacaaattggaaactgtttctcatatttacaggaagccacctacacgaaacaccatgctagtttcattatatgaacacaaatcccctactatgagcacaaaccatattacatataaaaaggtctcaccataattggtgagaccttatccttgaatcgttttattcatttgtttaatggctgacttctctaaacgtgatacttgcgcttgggaaatcccaatttcttctgcaacttccatctgtgtctttccttggaagaaacgttttctaataatcattttctctctatcatttaaacgcttcattccttctttcaatgctaattcttcaacccactgctcgtccttttgtttttcatcacttaactgatccataacaaagataggatctcccccatcattataaatcggttcaaataatgaaactggatcttgaattgcatctaaagcaaatactatctcttcatgagttacttctagcacttttgcaatatccattgctgttggttcttttgaattttctgcaatcaacttttctcttacttgcaaagctttatacgcaatatctcgcaatgagcgcgatacgcgaatcggattattatcacgcaaatatctgcgtatttccccaataatcatcggcacagcatacgttgaaaattttacattttggcctaaatcaaaattatcaattgatttcataagtccgatgcaaccaacttgaaataaatcgtcaacatattctcctctgttattaaatctttggatgacgctcagtacaagacgtaagtttccattcactaatttttctcttgcgcttatctctccactttgcatttcacgaaataatttacgcatctcttcattttttaatactggaagtttagctgtatcaacaccgcaaatttctactttgtttctcgtcaaagtgttccctcctatcgggagttgctgtacagtgtaaagtatttcctttgaaggggattttatgcatgtggttttttcacgatttgttatttaaattatctttcctaatacaactaaatagaataagaccagcctacataacggctggtcttattctttacaccattttattaaattcttttcgtaatctttttataattcttttttctaaacgcgaaatgtatgactgtgaaatcccaagcatatcagccacatctttttgcgtcttttcctctcctccagcaagcccaaaccgaagttccataatttgtttttcacgatcatttaattggtgtaatgctttcattaaaaggtgacgatctacagtagcttctaaatcttttgtaataatatcatcatctgtacctaacacgtcagacaataacagttcattcccatcccaatcaatgtttagtggttcatcaaaagaaacttccgaacgatttttgttatttcgacgtaaatgcattaaaatttcattttctatacaacgcgatgcatatgttgctaattttattttcttttctggattaaatgtatttaccgctttaataaggccgattgttcctatactaatcaaatcttcaatatttatccctgtattttcaaactttcttgctatatatacaacgagccttaagttacgttcaataagtaatgaccttgctgcctgatctccttttggcaatttattcaaaagaacttcctcttcttcttttgttaacggtggtggcaacgcttcacttccaccaatataataaatttcatcggtcttaattcctaatttcagcaatactttataccaaaggtatactaaataaaattttaatttcatcatattatcccgcctctcattattaagcaattaccattttttgtgaaatcaacatttttggatgcacaatacattgatactccccattagtagaaagctgttgtgtatttaatccaattaatactttgtttacaacaatagaactaccttcatggtcaacttgcacactgtcaggcttaattgcccacaaaaattgactctctacccctactgcacggaaaggaattaagcgtaattttgtcgcccaaccagaatcattttctggtatttgaggaatttctgttttggaataaatttgttctgttaaccaagatggtaagcaatgttctaatgatgaaacatgcataatcataacgggtgtttttgttaatgggtcataaagttggttcccactgtcaataagacctgccagttctagttcttcttctgctaattgaatttttactttcacaatttgatcatagtgtattttcgtgacctctacgctttcaatacgctttttagaaaaataataaattactggaaaaccaaaaataacaaataaccaactaattggatcaccgtaagaaattgactgagattgaaccaatccatttaccatttcattcgtttgcaaaaagaaatgagttccaattaatcctccgccaaccataaaggttacaaagtaaaaagtaaaaacagtttgtgcataatttctaaatgttgtaaacccaaatgctgtatacacaataagtaacgagtacagtagtttcataattggatgtgtcatcatagaagcaaaaggagtaaaggcaaaaataacaatagttgaacctataaatgcccctaacacaagcctccattttttgattttcttttttaacacggtagctgttaataaaagcaaaagaaaatcaatgcaggcgtttaacaaccaaacaacgtcggcgtaaacaaccaaacaattcacctcttttttcaagttgagactagtataatgcatatccaataggaaagtgtgtcaatttgcggaggtgtttttttgttattttgtgatttctagacataatctgtcggtaaaaaataaaagtacaaattcatagaatgatatactcttattttcaccaacaaaatataccaaataaaaaaaagacctgcttagcaggtcttttccatttaaaaaacaaaaaaggagcatgaaagctcctttttttatcgtctacgacggttacgtaaaaatgctggaatatcgatatcatctgaatctgaatgacgctcatgtacaactggctcttcacgcttcatttcacgttttacttcacgttgttttgaaggttgagctactggttgttgctgttgttgcgtgtggttcgcattcgggcgaataattggttttggtggttgagttgcaatgctatcatcaaaaccagttgcaattacagttacaacgatatcatcttttaatccttcgttaataacagaaccgaagatcatatttacttctggatctgaagctgaagctacgatatctgccgcttcttgtacttcatataagcttaagttagcgccacccgtaatgttcatgataacaccttgagctccatcaatagatgtttctagtaatggactagaaatcgcttttttcgcagcttctgcagcacgattttccccgttaccagaaccaatacccattaaagcagaacctctattagacataattgtctttacgtctgcaaagtctaagttaattaaacctggcgttgcaattaaatccgaaataccttgaacaccttgacgtaatacgttatcagcttcacggaatgcttctaacattggcgtatttttatcaacaatctctaataagcgatcgtttggaattacaataagagtatctacattttctttaaatgctgcaataccagatgctgcttgcgtcgcacgcttacgtccttcaaaagtaaatggacgtgttacaacaccaactgttaaagcacctaattcttttgcaacttgagcaacaactggagctgcaccagttccagttccaccgcccataccggcagttacgaagaccatatccgcaccacgaagtgcttcttggatctgttctttactttcttctgcagcttttttccctacttcagggtttgcgcctgcaccaagtccacgcgttaattttccaccaatttgcatttttgtttcagcttttgatagatttaatgcttgtgcatcagtgttcacagcgataaagtctacaccttgtacaccgtgttcaatcatacggtttacagcattgtttccgccaccgccgacaccgataacttttatattcgctaattgatcttgagtagtatcaaactctaacatgtcgaaatccccctagaacctcatttttcgtgtccaattttaatcccataaataacggaatacacgttttacttttgacatcatgcggtcatcattttgattattattgttttgattacgagttttttgtttcgcgggttgctgttgtaccggcgttggtgctggtgctggtactggttcaaaatgctcttgcttttcctgcacatttttcccacgtaatttagctttttgataagaatgtttaattaatccaactccacttgtatattggggctcacgcacaccaatataatcaggagttgctacacgaacattttcatgtaaaatatcatatgcaagatcaagaacacctggcatagaagcaattccgccagttagtacataaccagaagccacttgctttactcctaacttacgcacttcatcttgaacaaacattaaaatttcctctacacgagcctctattatatccgataattccaactgagaatattgttctgtttgatcacttcccataataggaaccgtaaacatctcttcttcagatgctgtatcataaaaagcatgtccatatttcaacttaatttgatctgcattttctgttgaagttttcaacccaatcgcaatatctttcgttatatggtctccacctaatggtaatacgctcgtcgcttgtaactctccatctttaaaaatagataaagttgtagatcctccccccatatcaacaagggctactcctctatttttttcatctgaagatatagcaactgttgcagccgctaaaggttgaagacaaatatcaacaatttcaagacctgctttttctacacaacgaagtaggttatgtagtaaagttctcgagcctgtaataagtgtaccttccatttctaatcttacaccgatcatcccgcgtggatcgttaatctcgtcaagaccgtctacgatgaactgtcgaggtaccacatcaataaactcacgctctggagcaattgacacaacttgtgctgcatctagaacgcgtaagacatcttcattcccgatttcacgatcttcatttgaaacagcgactactccgtgacaaggaagtagctgtacctggtttgcattgacacctactacaacttgctcaatgtggattcccaccatgcgctcagcttgttcaattgcttttttaattgatcgaacagtctcgtctatatcaactatcgatcccttctttaaaccatttgattttacatttccaacaccaataatgtttaagctgtcattaaccatttcaccaatgatgactttaacattggatgtaccgatgtcaagactaacatatatttcattgctgttcattctttggcacctccttctttatttataccatacaactcaatatatggaacaacaatcgcaactttactatttataagaaaaatattcaacgtctttatacgtttcccttttttaaccctatatttttcttatttttatttagcattcaattaagaatatcgcagtaaactatgaataactgcttatcttgaaataattctatttccagtgtaaagtttaccgccaagtataagtctacactaagatgtactcatagaaaagtgaaacttgtaccaatactagtatgaatctaagaatttttacatatttttcatcaaatgaaccattcttctaaattcgtatacatataatagaacattcgtttcgttttttctgctataagcaacgaaaactaccattctattcttttttgtcttccgcacctaattctttcgtatatgcacctacttctaagtcaattaataccttcttacctggctcaattgtttttaaaataagtggataggcttccatacgttttgcgaaattttgaatcgtagtgctcacttcataaccttcattcatatataaagtaagatgatcttcattcgcatttgttggtgaatagcgaatctccgaaatagattttaaaatagctggtgttaatttttctagttcagcgattaactccttcattttctcttctttaaaaggttcgaaaatcggtgctgcaacaggaagttttccattaggtagtacatcaagcgtttttccattttctaataacggttgtagttttccctctttatttatataaccaatcgttaaatattcttcgatatgaatatcaatcttgtttggaaaacgtttttttacatttactgctttaatttcttttcgcttcgttaagttttcttcagctttatgtgctgtcactcggaaataacttgtatcatatgtcacgcctgaatccttcattacttgctcatccgtcatatagtgatttccaaacacactaatcttttttatattactaagcggagaccgaaaataaattaaaaagagcactaataaaaataaaattgatatgtataaaatcaatcgatgattaacattttttttgttttttttcttttgatttttcaattttggtacacgatcttgtagtttaatcactttactattattcatgtacgatccccctatgtaacataaagaacggcatgttcctcatgccgttcttatcttcttattataacataaatgataatgagcggaacgaataaccgttatcttccaatgatttctacttctgtgtgcatatctacatcaaatttatccttaattgtatgttttattaattcaattaaagacattacatcttgcgctgaagctcccccggtattaacaataaaattgccatgcatttcagaaatttgagctccaccaatcctataaccacgaagccctgctttttctactaaatctcctgcaaaatgtgggattggattccgaaatatacttcctgcacacggatgattccatggttgcgtttcacggcggtagtctttattattttgcatgctacgtacaatttcttcacgttttcccgcctgtaattgaaactccgcctctaaaacaataccaggacgtttcgtttgcaatacagatgaccgataagaaaactccagttctttattcgttaaccaggcaattgtaccgtcttcaaacagaatgagagccttcgataatacactcgatatatccgatttatgtgcacctgcattcatatatactgcaccaccgacacttcctggaataccgctcgcaaactccaatccagctaacccttgacgactaagtaaagttgacaatttaataagaggatatccactaccaactcttaccttatgtttttcgacctctaagtgatctaatccttctcctaaacgaataacaacaccttctatgccttgatcagatacaagaaggtttgaaccgcgaccaattacagtccacttcgttttgtattgctttactaactgtaatgttttttcaataccggctacatgctttggcacaattaaaatatccgctggtccacctattttcatagttgtataacgtgctaacggctcgttaactaaaacacgaccaacgtctgcttctataagctcatttactaattgttccatagacaatctcccccatattaagtctccttatgacaataatatgcagggcgttcacctaacgttatccctctatttacgggcagtacagctcctaaatcaaaattcggcgataacaaagaaattaggcggaatcaggatgtcagtaaacatccgattagtgaaagataataatcaacgagagagaatcactccccactaattaaagcctcactttatttttttacaagcttattcattacttcatacagcttatttgctgcatctggaatacctagttgcttagccgctagcttcatattttgtaatgtttgtgcattcaataaaatctcatcaatatcacgaataagcgtttcagctgttaaatctttttcaagtaacatttttgccgctcctttatcaacaactgaacgtgcattcttttcctgatgattatttgttacatacggactcggtattaacacacttggttttcctaacgctgttaattctgcaagtgttgttgccccagcccttgaaacaacaaggtctacaccagttagtacctctggcatattatgaatgaacggcttaataataacattgcttgggttccctttttgcttcacggcttccatcactttatcataatgtacttcacccgttacatatagtatttcgtagcttttgttcccaaactgttcaattgcttcaacgaaggcatcgttaatcggtctagccccacgacttccaccaaatataagtacagactttttaggaagagaaagcccaactgaacgtttccccttcattccattttgatccattacctctgatgctcgtggattacctgtcattaccacttttgactctggaaaatgctctatagctgcttcaaaacaaacagcaactttatcaacataacggcttaaaaacttgttcgttacacctggtacactattttgttcatgtacaatagttggaatacctaatttggctgcagcgtatacaactggtccacatacatatccacccgttccaattacgatatccggattaaaacgacgaatgtatcgtttactatcctgtacaccttttagaaaacgcattactgttttcacattatctaatgatatttttcgtttaaatccacttataacaatagattgaaatggtatacctgcttttggaacgattgtactctctagtccattttccgtaccaatatataaaaatctcgcttctggatttaacttttttatttctctaattaaagcaagagctggataaatatgaccaccagtacccccaccactcactaatacacgcactactaactcctccgcttctcttttcttatttccattatacttatttctatatacatattgcatttttacacacatacgaaaaaccctgtcttataaacagggtttagtagcgagaatggcgacttatatttaataatacacctactgccattaacattaatgtcaaacttgatccaccataacttaaaaacggcaaggtaatacccgtaacaggcatcagtcctgttacaacaccaacattaatcattacttgaatcgcaatcatcgccacaatacctactgctaaaaacgtaccatataaatctggcgctcctaatgcgatacgaatcccgcgccataataatagactaaataataataacacaaatgaaccaccaataaaacctaattcctcggataagatcgcaaatataaagtcagtttgtggttcaggtaaataaagaaatttttgtctactttgtccaagtccaagcccaaataatccaccaggtccaattgcaagtaatgattggataatttgaaatccactcccgagcggatctgaccacggatctaaatatgatgtaatgcgtttcattcgatacggtgctgatgcaattaaccctacaaatcctgctacaccaatcaaaccaaacattgcaaagtgaaagaccctcgctcccgaaatgaatatcataatgatacatgtcccaaccattaccgttcctgtcccaaggtctggctgtaacataatcatcccaaaagcaagaaacacaaaactaagggccggtaataaaccacgtttaaaagatgtaatcaatttttgccgttctgctaaaaactttgccaagaaaataatcatcgcaaacttcataaattctgacggttgaatcgaaaatgctccgattccaatccaacttcgtgctcctcctcgaacaagacctactccaggaataagaacgagaataagaagaatgaagcaaactagcaaaatcacttttgaatacgtacgccacacccaataatcaattttcataataaaaaacatagctactacaccaagacccgcaaacagtaattgtctttttgcaaaaaagaatgagtcccccattttataagaggcccaaactgcactcgcactataaaccataatcattccgattgtcaacaatgaaagtgttacgatgatgagaataaaatcaggcgttttcttcattacccacaaacaccacctctttaggcagaaacttttgccctatgtaacaaaacatcagtaggtgttagcctactgatgttttgatttactttatataagtttatgcacagcttgtataaaaatgtctcctctttcttcaaatgttttaaattgatcccagcttgcacacgctggagaaagaagaacgacatcgccatctttagaatgagcataagctttcaccactgcttcatctaaagtatcgacactttcaattatatctaatcccgctttttctgccgctcttactagtttaggagctgtttgtccaaatgttacaatcgcttttacatttttgaaatacggaattaaatcatcgaattcatttccgcgatcaagcccacctgctagtaacacaatcggttgtgtaaacgcagatagtgctttctcagtcgctaacatattcgttgcttttgaatcattataaaacttacggttgttaatcgttgttacatattctaaacgatgttttacacccgtaaaacgttttaacacgaccgtaattgcttcattagaagtacctaataatttcgcaatactcatcgcagctaaaatattttctaaattatgttgaccaggtaaaacgatatcgcttacttcaacaactttttcacctttgaaataaagagcgttatcttttatacacgcgccatcttcaatttctttcgttgtcgaaaacaggattttttgacctttagaatacgcagacaaagccatcacatctgcatcatctgcatttattacactataatcattttctgtttggtttttaaaaatatttgctttcgctaaaccatattctttcttcgtcccatgataatctaagtgggcctcaaataaatttaaaaacgcagcaattttaggttggaacaattctactcccatcaattgaaatgatgaaagttctgtaactacaacttcattttcttttgcatcctgtgctacttcacacgctacagtgccaatgttccctgcaattacaggatgcttttgtccttcttttagcatttcaaatgtcagcattgtcgtcgtcgttttaccgttagaccccgtaatcccaacaaatggtgcttctgaaatacgatatgctaattcaacttccgtaacaatcggaatttgcttttctttcgcagcaactaatattggattagaatacgggattcctggattttttactacaagagaaatatttctctctaataattctaaaggatgaccaccgcatacaacgtccattccttttgcttgtaattctgcagcaagtacattctctgctaaaggctttccgtcatttacaataacatttgcccctaacttttgtaacaatgtagctgctgcataaccactttttgcaatgcctaatacaagaatattcttattttgaaattcagttacagttttcaattacatccacaccccgatataaattcctaacacagctaataaaaatcctgcagaccaaaacgtcacaacaacacgccactctgaccaaccacataattcataatgatggtgtaatggactcattttaaagacacgttttcctgttgttttaaatgaaatgacctgaatgataaccgataaagtttccattacgaatactccgccgataattacaagtagcaattcttgttttaataaaatcgctacagctgcaatggctccacctaaagctaatgaacctgtatctcccataaacacttttgctggattcgcattgaatactaaaaatccaagtacagctcctacaactgccatacagaatatcgccactccaaattgctcttgtgccacagcaataatactaaatgctccaaatgcaatagcagctgttcctgataataaaccatctaaaccgtcagttaagttaactgcatttgatccaccaataagcataaatagtacaagtacgaaatacgcccaacctaattcaaacttaacatccgttcccggaatcatgatgtatgtgtggaacgcttgcccttttccaattaaaaagaatgcaatagcaataacaagctgacctactaatttttgctttgatgttaaaccaagatttctcttcttaaccacctttatgtagtcatctaaaaatccaatcaagccgtaaccaaacgtcactaatagtaataacgaaacctctgcacctaaataattaaacttaatcgccataataagtgaagttaccatcatagatacgtatatgacgataccacccattgtcggtgtccctgattttttttgatgtgactttggtccctcatcacgaatactctgtccgaactttaattttcttaaaaatggaataaacaatggcgaaagggcaacagaaattaagaatgctaccccagccgttactaataaaccttgctcaagcacatgtagtcctcctctcacgttgttactcttcgttgcttaaacgccctttaattgcttctttagcaacttcacgatcatcaaaatgatgaacttctttaccaataatttgatacgtttcatgacccttaccagcaataataatgatatcatctgctttcgctttagtgattgcatggtgtatcgcttcttttctatcaataatcacttcataatttttcccacttgcaccatgtaccatatcatctaaaatagccgctggatcttcacttcttggattatctgatgtgtaaattgcatgagttgcatattttgttgcaacacttgccattatcggtctcttcgttcggtccctatcgccgccacaaccaacgatacaatacacatcaccttttgcaaattgttttgcagtttttaatacattttctaaactatccggcgtatgtgcgtaatcaacaataactgtataattttgtcctccatcaacaacttcaaaacgccctggaaccccagctagttcttttataacagcaatgattgtttctaatttcacacccgaaacaagtcctgctgctgttgctgcaagtacgttatatacattaaatttacctattaatttcatcgtaacatttacactttcatatggtgtgacaagcgtaaatgtagtcccgccactcgtcataacgatattttttgccataatgtcacttgttgtatcaataccatatgttacaactgttgctgcagtacttctcatatactcttctgttacattatcatcgctattcagcacagcgtacttttcacgattatgattataactattgccaagctgtgcaaatagtaacccttttgcatgtttatattcttccatcgttttatgatagtctaaatgatcttgtgttaaattcgtaaacaccgctacatcgtaatcacatccgtgtacacgaccaagatctaacgcatgtgacgaaacttccattaccgtgctgtccacaccttgttcaaccatttttgaaaacgtctgttgaagtgttagtgcatctggtgttgtatttttcacctcaaatgtttcatcaccgattttcatattaatcgttccaattagccctgttttatgaccatgtgctcgcataatctcatccataatatgcgatgttgttgtctttccatttgtacctgtaattccgattaaatgtaacttgtgtgtcggttgaccataaaaataatcagctaaaaccgctaacgaacgaaaagtatttttcacaagtacaactggaacgtcaacatcaattggtctttccgcaacaatagcagccgctccttgtgccgctgcttgcttagcaaaatcatggctatcaaccgtatatcctttcatacatacaaataagcttccctctttcactttacgtgaatcagcttctatagatgtgatttctggattttcttttggaacaactggaaaatcatgcaaacatgatacaagtgtatgcaacttcatttcactaaaccctctctacattgtttatttatcttttttcagtaagcaacacattacctcctatataaggaggtaagtgctactgacctatttatgaatgagacacttactgtctcaaattaagtaactgttctataaagaactcacttccaccaattgtaccataaaacgtactatgttacctttaattcccgaagtaaattctaatttttgagccttcttttactttagctcccgcttctggtgattgtttaattactttctctccatctccacttatatcaagcttcaaatcgacgagttgtgtttgtaagtctttctttttcattccaattaaattcggaacttccacagttggtgtatcgccccatttatattctttctcaacttgttcttttctcggtttcactcccataacaggaagcgcatctcgaaggatattcccgacaatcggagctgctaccactccaccaaactgtgtaaccccttttggattatcaacagctacatacacaacaatctctggatcatccgctggagcaaatccgataaaagatactatataattattctctaaatatttaccatccttcaccttttgagcagtacccgtttttccacctacgcgatatccatcaatataagcacctttaccagaacctttcgctacaacattctctaatgcataacgaactttttctgaagtttccttggaaataacttttcttttctcaacaggtgtctttttactaacaacttgattatttttcggatcaataaactccttagctatatacggctgatacaatgttccaccatttacagccgccgctacagctgctacttgttgaatcggcgtaacagaaactccttggccgaatgaagttgttgcttgctctactggaccaactttatctaaattaaataaaatcccactgccttcaccttgcaagtcaattccagtcttctgcccaaaaccaaaattacgaatgtatttaaataatcggtctttaccaaggcgatcaccaagttcaataaatcccgggttacatgagttttgaacgacttctaaaaacgtttgactgccatgacctcctgctttccagcatttcaatctagctccacctacttcagctgctccatcatcataaaacgtatccttctctaagtctactaaattttcattcaatgctgcagctaatgtaatgatcttaaatgttgaaccaggctcatacgtactccatacaggtagatttctgttatacacttctggagagacactttgaaaatccgctgggtcaaaactcggtcgactagacatccctaaaacttcaccatttttagggttcattgcaatcgcaatcataccgtcaggattataagttgactccgcaatattcatttctctttccataatccttgtaatacgcgcatcgattgttaatcctaaatttaaaccggcttctggctttttgaaatcatcaccaacattaggcatcctttgtcctttcgcatctgcaaaaaaacgcacatgacctttgtccccatttagctctttatcataatatttttctagtcccataagaccttggttatcgctacctgcaaaacctaatacatgtgataaaaagtttccaaacggatagtaccggatagaatcctctgcgatatacacgcccttcagacttaatcctcgtacttctttcgctttgtcatgtgatattttccttccgcctttatctaaccttacaatcgattctttttttgtaatccttttataaatctcatctttttccacacctaatactgcagctaacttctctgcagtctccgctggtttttcaatttgcctcggtacaacaaagacagttggagcacttttattcgtggcaagttccacaccatttcggtctaaaattttcccacgttcgggttcaaaagtaatattacgactccatgaatctttcgcacgatccgttaacatattcccaagaaaaaattgcacatatccaagacgaatatcgataatcgtgaaaataagtatacctgatataagtataaaaataagtcgttttctaactgttacatttgatacacgcatattggaacaagcctcccttacgcctagcttgttccaatatatgcttgtacttatttaattagaacttattctcttttaccattacggcttttctgcttcttgctgtggttcgagtggcggtacgagtgtgacacctaattctgtaccaggttgtaataatgttccttccgccacactttgttctgttacgtatcctgtaccagaaggtttcaagttaagctgtaatgtcttcgctaaattcataacatcacgcagtgcccatccttgtatatttggcattgtaggcttatctcctaccaagaagactcggtcgccttttaatgtttgttcagtcgcttttggtacttgttgctgtactttcccttcacctagtacgattggacgaagttttgctttatcaatcgctttccccgcttcagccatcgttttaccatttacatccggaacagtagtttgttgttctttcagatgttttttcggatctttaacttcatttggcttaatctttaaatactctaaactattttttgttacatatttaaaaatatcagctaacggttgtgcaccgttctcatcatcttttaatttaggctgtttaacagctacatacacaacaagttgtggatcgtccattggtgccatacctaagaatgagaatatataattctgtctccctgtcatatagccgccttttccatccggaatttgcgctgtacctgttttaccaccaactgaatatccatcaattttataagctgtccctgtacctttcggagatgtaacaacacgttctaataattgtcttacttgcgctgctgtttcctttgtaacaggttttcctacttcttctggcttatgttctaattttactttgtctgttatcggatctacaattttatcaattgcataaggtttcatcattttcccatcatttgcaatggccgttgcagcttgtacaagctgaattggtgttacagtggaaccttgtccaaaagctgttgtcacttgttgtatttgctgatcaaataaaattgtattcgatccttcacctgataaatcaatgttcgttttttcatctaatccaaaactatgaatatattttcggaaacgttctggaccaagtttttgatctcctaaaattgcaaacgctacgtttgaagaacgctctaccccttcatcaaacgtgatagagccccaaccagcaccaccgttatgatcttttattttcctatttccgacttgatatgtcccggactgataataatcttggcctttgtacacaccttcattaatagctgccgctaacgtgaaaattttcattgttgatccaggttcaaatgcattggcaattgcgtcattaaagaaatatttaatttgacgatcattagggtcataactaggtttagtagacatcgctaatattttcccagttttcggatctgcaacaatccctattaaactttctggctcatattgcttacttgctgctttcatcgcgtcttctaaataactttggacacgttgatcgattgttaaataagcgttatctccatttttaggtgcctttacattaacttttcccccatcaagggacacacctttacgatcacctgtatatgctacttctccgttcgaggcacttaagtatttatccaagcttttctctatgccaaattgacctaccgaggttccattctcatttggttttgcatgacctataacgtaagatgcaaaatcaccgtttggatacacccttgcattttctgtaataaaagatattcccggcaacttcaacgcttctatttgttccttcttttctttcgtcaaatccttgcctaacgttccaaattcgacttgacttctaccttccttatttaaagaagctaaaatatcctcttcgccttttccaagtactcctgcaattttctttgcagtatcttctttattctcaactgagttagcaccttttagtgcagctaccattttgtaagagtttgcgtcttgcgctaacacatgaccgttttgatcataaatggttcctcggttcgcttcaagaactccttttttactatgcttttgtttagcaagtgcatctaaatcctgattatgaactgttcctgttgattgtatgtaaaaaaatcgggctaataacagcaaaaagagcaggaggaaaaatatcataaaataacctgctcccttattggtatgaaatttagtcatattcttcttcatcgttccttcacacctattgccttatttgaggcctttcacattattcgcattaatttctagcccgtgtttttttgcaacttcagcgattcgttcatagcgacttaacttctctacttcagcttgtaattcttgattttctttttgctgctgtacaattttttcttctatcgtcgctgcttctacattaacttgataaaggcctgctttatttccaataaacgcgacacaggcatacaataaaaagccaataaacgctacatacaacagtttttcgattcttgtaattttcgctttaaccttcggcttagccatctgctgtgggggcgtttgaatttgcacctcttcttgcgcttgttgtttgtactttacagctaaattagtcatacctctctctcccttttatcgtttttcagcgattctcaacttcgcagaacgcgcacgattattttcttctagctctatatcagaaggtaaaatcggttttcttgtaataagctttaatttcggcttaaattcatcaggaataatcggtaatcctggcggcaattgtggcgttgtactatttcgcttaaacgttgttttacaaatacgatcttctaatgaatggaatgttataacactaactcttccacctggcttaaccatctcaatagcagattccaatgcttcttcaaatacttttaattcatcatttacagctatacgaattgcctgaaacactcgcttagcaggatgcccacccgttctacgagctggagccggaataccttctttaattagctctactaattctcctgtcgtttcaatagctttattctcacgataagcttcaatttttcttgcaatttgttttgaaaatttctcttcaccgtattggaagaaaatccttacaagttgttcatatgaccagctatttacaacatcatacgctgttaatggggcatcttgatccatccgcatatctagcggtgcatcatgatgataactaaagcctcgttctggtgtatctaattgtggggatgaaacacctaaatcaaataaaataccatctacttctgttatacctatttcctgcagtttttcagctaaataacggaagttactctttactgttataaactgttcaccgtatgaagagaacttttctttcgcgttttgaatcgctatctcatcttgatcaaacgctattaattttccaccttcagttaattgggataataaataagaactatgtcctcctccccccagtgtacaatctacatatgtaccatctggctttatatctaagccgtctactgtttcctttaaaagcactgttacgtgtttaaacattgttgcacctactctttttccaattaattatgttgaatgtatcccttcctctaaacacatatttcacgcttagagaatgaaataatacgaaagaacgactcatttaacttaccaacaaaggcaacatactatacaaatcgctattttcttttattatatactaaattttatcatcttttgcgggaatttaaataaaaaactgtcgaaaaagcgaataatacgtttacattttgtgctattttgtcatatatttaagtatccaacacaattgccatatctaacatttttttgattgataattcagaaaaaaatcacttcacagtaaattcaacggaataaaaataaaatcctgctccaaagagcaagattttatagttttataacatgatgttttccgtcccaagaaaaagggttttccattacacgatcaacgaaatccaaaccaaactgatttaaataataacatacattccacacacgttcttgcggcgcacctaatggacgaagtgcgaattgtatacggcggaatttatttagctgaacctcatactttttctcaacatttcttttcaacattctttccaacagttcaatttgttcattaattttcaattcgtttttccctgcaaacgcacctaaccctggctctattttctttacaaattgctgtaaagatgtatgaatatcggcaatttcttttttcgccttttcaaaatgatcatcaatcggttcctctatttgattaaacaaccagttttcacgcagtttatcgacatcatttaaaaacggatcaatttctctcaattgcagatcgaataaatctgtcgctatatctctctccacataagtaattgtaagacgaggaacgacaggtggcatttgaaaaccgacagtatggaatacttgctgtaattcactccaataagctaattcccctggacctccaataaatgcgagcgtaggaaatacatactcttgcataagaggacgtgttacaacattattactaaaacgtgccggatttctctccatctcttcaatcaactcttcgtatgaaaaggaatgcgccccatcctttccaacaaacttaccttgatgctcttcaagcaatactcgttcattatctatttccatgaatatatgcactgcatgagacttcgtttcaataatcggtttgtatcctagttctttaattacttcctgctgattacgaaggccctcttgtacctctttatacttacttataattcgcttgaaaaatggaatttctaactttcttaattcaggatgatgtgaatcaacaaggattaaaccagaattagcaaagattttcgtaataagatgagcaaagaaatctacatacgtattcgattttttcaaagcatcatcaacaaattttaatacatcttttgtaaaatttgtttctgggtatgttttaaaaatctcttcaatccaatttctacaatcttcaacagaaagttcagactcagaagcacttgcctttttcggattacggtcataaaaaatagtttttttcatctttttatttttcgctacaaaagtatgattaatctcatccatatcatggtcttcacccgcaatccagaagacagggacaactttaactcctaaactttcttccttttcctttgcaagctgtaaaattgaaataactttatgaattgtataaagcggtccagttaataaccccgcttgttgtccagctataacaacatatgtattttcatctccaagcgcttttacattttgaagtgtagattctcccgcttgtaattttgtattatattctaataaatgcgctactaaatcttggcggaaaaactccctttcacgcaaatcatgtaaacgttgtttaaaagcatcttctgttaacatataatcaaaacatgactgtatctcttttttaccgttcatatagtccgctacaataccttgttgcggaacagagatttcttttatctccatataattcttcctttcgtatccagttctctcaccaatccacattgtagtcaatgtttcacgtaaaagcaaagaataacacttatactcttgtttctaaaccttttattgcatcgaacaaaaattgaagtgtcggaactggtcgttgctgtttcttagcttcttctaatacatatccaacaatcgcattaatttccgtctttctactcgctcttacatccgctagcatagaagatgtattacgagacgttccttcacacacatttcgtaccatttgccataccatttctttttctcctctaataagaaatgctgcctcctgaaacacttgctccatcatttgataaaaaaaacgattcgtgattaattcaccattcttaactcccaatagtgctgtcaacggattgatacatacatttactactaattttttatgcataatctcttcccaatccgtttctatttgaactggaaaataagcaacaggaaaataattgaatatttttttaaaatgtatagattgaccacaaaccactccaaattttgttacccctatcccagtatgatgaacgatatgccctccctcttttttcgcaccatgttctacaataccaacagctatatttttactccctatgttcagcatcttttgaagatgcgacattccgttttgcaaaaagattaatgatgatgccccttccacaaacggtagtacgtcatctatatgatattgcttcacagcaataaatatataatctaaattttgcgctaccatactttctatcggtaaaacagatggatatactgtttcacatcttccatctctaatacaagttacacctgtttcatttaattcttcagcttgcttagctgttcttgtaaacaacgtaacatcttggttatttttttgtaaataaaatgtatacaatagaccaatagcacctggtccgacaattccaattttcattttcacacaaggaattcacactaagtgcccttgccttcccccctttatatctttttaaagcacctgagcacgccctataattccgctgtcctctgcccaacaaatatactctcatttttcactatgtatgtaccacctattaatacgcttctactcttagtttagcaaatcctcaaaaaaataaaaaaagaaatatactatcttcttcataaaaataaaaaaatgagttatactattattataaatatttttacttttctgcattcaacgagacaagaaaaggatgtgatgtaatgggattcccaaaagttgagcgcttgctcatcaattataaaacgttagatgaattcaaaaaatttaaagggtgcggagcccaggaactatctatgctggaagaattacaagcaaacattattgaaaacgacagtgaatctccattttacggtatttattatggcggatcactaatcgcacgtatgagtctatatatgaaaagaaacggcggagaaccattcgaaattacaggtccctacctagaactttataaacttgaagtattaccaacttttcaaaaacaaggattcgggcaaatgcttgtaaatcatgcgaaacaaatgcaatttcctattaaaacgatagcacgtattcattcagctggtttttgggataaattaaatttcaaccccgtatcagtaactgatggagatttttatatttggcatccagaagcaaatttgaatgcggttacaaacgaagaatcggcttaagaaataaaaaaacagctgtataacagctgttttttatttcttaagcttctctaacttctcattcgagcgagcattgtttctttccgctaccattacacttcttttttgatcgatataatcaagtagtgttctatactcttcttcatatactgataatcgctccagaagacgctctctttctgtttgtaatgattcaacttgttgttgcaacaccgttaaagagttttcatctttataattttgcaagaaatcaataacatcattcaacgtaattgacgtaggttctaacacctttgtctctttcacttcataattttctactttacgaagttgctttgcttcctcaatacgttctttatattgctttcttacgtaagaattccatctaaacccacatgctgctggtgtacgagataaatttttccccacttccttaaaggcagaaagttgtgttccaccttctcgaatatgccggagtactacttctgccagaagcaaatcttcatcatcagtccaagcatcttgtcttgttgtcgccatctctctagtcctccctatgcattttttattaagcatatgcagttactagaaaagatagaatacaacaactaaagattaagacaaaaaaaataaacgcagaagatatcttctgcgtttattttcccgcaattacttgctgattacttctttacctttgtaagtaccgcatgctttacatacacggtgagctaatttcgcttcaccacagcttgggcactctaccataccaggtactgataatttgaaatgcgtacgacgctttctttttactgttttagaagttcttctaaaaggtacagccattcttcccacctccttaaaagaaatagttattttcatatgaaggcctgaaccagtcttccgattatttgtcaaaaaactttgcaagtcctgccaatcttggatcaacagtcttttctttgtcttcttccgaaatcacttgccagtcttgaccttgcatcggtgctccaccagaaacatcatcactgaaaatttgcattggaatctccaaaagtatattttccttgattacgggcagtaagtcaagtacttctccttctaaagaatgaatttcagcttcagtttcaaattcttcttgtgaagtttggaacacctcagttgttttaatgtcaaatggtaatgtcacatctactaaagagcgagaacatggtaaaaccatgcttccagttatatgtagatgaaacgtaaacttaccggagccaaaatcaactcttcccgttacatgaacaggattaatttcacgaatatctttctcgacctcttttagctcacttacatctaccatctcatccaatgtcaatcctttatttctcaatttattcaattgatggatggaccatttcatatcatatcacctcaaggcaacaaacaaaattatagctagccattttatatttgtcaatgttttttctttacactataatgaagtcatcatagtaaataatatatagagtatcacgtttttcaaaaagatgctacatcgaaaggagagattaccataaaagctggtggtatagttgttgaatataacccttttcataacggtcatctttatcatgtgcaacagacaaaaaagttaacacaatccgatataataattgccgttatgagtggtccttttttacagcgtggtgagcccgcactcatttccaaatggtatcgcactaaaatggccttagcaaacggcgtagaccttgttgtagagcttccatacgtctttgcaacacaaaaggctgaaaccttcgcaaatggtgctatttccattttaaatgccctacgtgtttctgaaatttgtttcggtagtgaggatggacaaatcgaaaatttttataataccatctccgtacaaaaaaacgaagaagagacttttaactaccttgtaaaacaattcatggacgctggtaatagttatgcaaaagcaacatcggatgctttctcacacattttaacatctgaaaaaaacatagatatgtcacaaccaaataatattttaggcttccaatatatgaaagcaattctgtcacaaaatagctctatacaagctcaaactataaaaagatttgcctctcattatcatgatgaaacatttaatgaccaacatattgcaagcgcgacaagcatccgaaaacaactctttagcgaagaaggatcatttacaacaattgaaccttttctcccacaggcaaccacttcgcttttagcaaattacaaacaaaattacgggatattacataattgggaacaatacttttcattttttaaatatagactcatgacgatgtctccaggggacttacgacatatatatgaaatagaagaaggtttagagcatcgtattttatcaaaaatacaaaacagttcctccttctattcattcatggaagcattaaaaacaaaacgttatacatggactagattacaaagagcttgtacacacattttaacaaacacaacaaaagaggaaatacgtagcgcaaatatagaacaacacgcaccatatattcgcctgctaggtatgtcacaaaaaggacaaacttacctttcaaaaaacaagaaaaaaatcgaacttccaatccttactcatacaaaaacattcgaccatgccgctttagatatagagaaaaaagcaaactctgtatatttctccatcatgcacgaaccgttacgcacacaactattaaaacaggatataacacaccatcctgttcgctatgatgaaacaactacaaaattcctataaaaaaacctctctatttcagagaggttttttccttatccatcttttctaaatatgttaacgcatcatccagcgtatctactggtacaattttcatttttgttttaatatcctttgcagtctcaagtgcatctttatagttcgatttctccgcacctttttcatttggcgcaaagaacacttcagccccggcatcgctagcagccaccactttttgatttataccaccaattgggcccacttctcctttttcattaattgtacctgttccagctatttcatgtcctttcgttaagtcttcttccacaagttgattatatatttctaatgtgaacattaaacctgcggatggtccaccaatttcatgagaattaattttcactttcggatcgaccactaattctctttccgtaacgatagaaacacctatgccgacacgcccattcccattaggaatcgtctttacatttaaattctctttcaattgttttccatttctcatgtactcaatacttacagcatcgttttcttttttccctgtcatatattcaataaattgctccgtcttttcaaatgtttttccgtcaacagctataataacatcaccaagcttaagctttccttctgacggcattccttttgccacaccagcaactaatacacctttattttcaaaagatactgagcgatttgcacgtttatatgcattataaattgctgcattttgcgaatctttcatcgcataattttggcgaaattgatattcttcatcactctcacctttttgcaatatttcttccgctttcgaaatatgtgtatatttattaaactgtgccgctattaaattcaccacatttgctggtcccattgaaaccgtaacaagcataaaatcaccagattctttcgttccaccctcaacttgaacataaggctctaatttggcagccattcctggttttgttatataatacggtaaacgtacgtaaacaagtaacatcgccaatataacccctattaagattgcatatataaaccgaaaacgcttaaacattatgtttctccttccactgctcaattaataaataaatatttgaaacatgtttttctgcttctacttctccaactcgaataatgtcttcaatgtttgtaaaagcacgtgaactaaattgctctacagctggtcgcatcattaaatccgatgcaatttgccgattcattacaagctcatgctgcataatttcaatactttgtatgattacgtcataaatggacgtaacatcgccattcaccttaattggagatacatcaacagcgataacaatatcggcccctaactctttcacaaccgatactgggatgcgatcaatgactccaccatccactaataatcttccatctattttttctggtacaaacactccaggaacagatatgctagccctcaccgcatctgcaactggcccacttgtaaaaaccactttttcccccttcaatatgtcagtagccacaacagccgtcgggatatctaactcttctaaatttttattatatgtaaacattttaatcatatctttgacacgttttccagcaataaatcccattttcggtaccgtgaaatctaaataatacttccgcttaaaaacagatgccaatttatacaatctttcaacgttactacttgccgcataaaacgtacctattagcgcccccatactacttcctgcaatcatgtgaatagggatacccgcttcccttaaaacctttattacaccaatatgagcaaaccctttcgctcctccagacccaagcgctaaaccaatctttggttctttcatttttctcaccctttaatttttttcattcctttttcatacttatggtctaaattcactacgtatccacgtatactgaaatgaacgttttttgggacaaagggggatttacttacatgtatgaaaaatggaaaaccgctttccttaccatatcaacgctatttttaaccttttctcttgtactccacccccaagccgctttgcaagcttctattcgcgggttaaatatatggtgggaagttgtattcccttcactactaccgtttttcatcattgcggaacttctaattagtatcggtgttgtaaaatttattggcgttatattagaaccactcatgcgcccactttttcgcgttccagggataggcggatttgtttgggcgatgggaatggcttctggtttccctgcaggcgccaaattaagcgctagactacgaaaaagcaatcttttaactcagattgaagcggagcgcctcgtttctttcacaaattcttccaatccactttttattttcggtgctgtgtctatcggcttttttaataatccgaaattaggaattatattagccgctgcccattatttcagtaactttgctgtcggattaattatgcgtttttacggcgataataccgcttacaaaaataatacacacactacaaaaaaacgtcgctttcaaaacccttttttaattcttcacgagacacgcttacaagaaaaaagaccaattggtaaattacttggggatgccattgtttcttctattcaaacattacttatgattggcggatttattattttattctctgtgttaaataaaatgattactgtattccacattacagcagctctttcttttattatgcaacatattttatcattcttccaactaagtacagattttagtatacctatattatcaggtattttcgaaatgacactcggaagccaaatgattagtcaaataaatgaaacaccgctcttacaacaagctatggtaacaagcttcattttagcatttagcggcctttctattcaggcacaagttgctagtatattagctgaaacagatatccgatttaaaccctattttttcgcacgaattattcaaagtattcttgcccctatttttacatttgtattttggacaccattttatgagaaagtgagttctttctcacctatgccaaaagatattcctgtatttttatccgagcatccttctatactacatgaaatttggacatcttttatacattatggaccaatttttacattattttgtctatacttatatgttattttattatttttgcgcacgtataaagaaaaaccccgttcactttaacggggtttgaaacttttcttttaaagcacgctctacaataggaggtacaagatccactacacttcctccatacctcgcaacttcttttacaatactcgagcttaaaaatgaatattggttgtttgtcataataaaaaatgtttcaatattttcatctaattttcgattcatagaagtaatttgcatctcatattcaaaatcagaaactgctcgtaaaccacgtaatattgcatttgcattacgcatttttgcatactctactaatagcccactatgcgaatctacctttacattcgggatatcctttgtcgcttctcgaattagttctaatcgctcttcaactgaaaagaatggtttttttgatgaattgtttaaaacgactacgtacacctcatcaaatacttttgctccccttttaataatatccagatgcccaagggtaattggatcaaaacttcctgaagaaatcgctatacttgtcattctgtcccctcaccttcatacttataaatcgatattgcagtaatcccataattctcagctcgtacttttacaagccttcctattgaattaggtaaaactacatcattaccatgctctgccataattaatccatcactatgtagcaatccatgttgatccattacactaattaaagatacaattttttgctctttatatggaggatctattaatataagatcgaatgacatttcacgttttattaacgcctttactgcacgttcagcatcatttcgatatacttcagcttgttcctgtactctacaactttctaaattttgatgaattacttttatcgctttactatcccgatcaacaaaaattgctttatcgatccctctgctcaaagcctcaattccaagaccaccactaccaccaaataaatcaagggcgataccaccatcaaaataaggacctatcatattaaaaatagattcttttactttatctgtcgttggacgtgttgtattaccaggaaccgctttaagtgggtgtcctttacattttcctgaaactactctcatctgttgtcactacctttatttcaatctatcgagcgattatagaaagccattcccacttcggtaaccgttaacaaaccacattcacctaactatagaaaaactcggcctcaaataacctctcgttatttttatgtattcatctcatcattcactaatatgaacccaatatgtatattagttccactttatcttttttatcctatcacaaaataaaaaaaagaaaaataaaaagcccaacataaaatttaatttcattatgtatatcttcatttagattggacataaataattataacaacatcaccttcgatgttgttgccaaccgcggagaagacttacgtttccccataagttcttcctccggtttctcctctccctttgccttcttactagtacatgctagtataagaagggccctgctatgcagggttttttttctttgtgtgcttttcatttaaaaagtgaaatggtacagtaaaagaaagaggaggaaaagatatgattcaacgctttatagaacttggagaaggctactctgatttatatgaattacttgaaattgccaaaacaaatcaagaacgtatagcacatatgttacaatttgaaacgataaaaaacgataaaaaagtgtgttcgcttgttgtaatattaaaaccaactactactggtgatttccaaccattatacatatgtcgtgaaggcattcctgtatttgaaaataaaaaaagtaaacgtgtcattttatttgaagaaacggcagaacaactcgggaaaaaagtggctacctttactgtaaaaccatctacaactttcccagaaaaagaactattttttaatcatttaattggtattttacgaatgaacaatttcattcctccgatgaaataacacgttatttcaagtgaaaaatcccccgctaaatttagcaggggattttttctattagctataatcgtattcttttgctcgatcaggacgggaattttcaaattccgtttttaaatacgggcgatacgactgttctatctttttcacaaaaggaagtttgttcaacttatgcatcatatgctcaatttgttccatatcacaatatactacagcatattttaatcgttttgatatgtaatgtatgttaccatatttccttaaaatcttggcatgtttcaatgaatgtaaataaacaatcatactttgtcgttgcccgaacataatcttctccatcttctccttttaaaaacatatattttatattctatgaaaaccaatcagaaatttataacattacaggacaaactctgtatacgttttcttccaacttctaaaaaacggggtacatcaccccgtttttttacaaccacaacctccgccagtaccacaacctccaccacagccaccagcatcaaagaatggatttcctgttggcactttaatggaagaagacacttccgaaccgattgctacactaacttcatctaataacttctgcaaagcagtttctgctcttttaaaagctgcaaccttatcatgtaagtccacagaacgctttaattctctcattttcatcgacacggtagtatagtcaggatggtattttccaaaacgctgtacttcctcataccgttctttcatcgctgtaaattgctgaattagcgtctgaagttccatatcttcatgtaattctctataatacttacgataatcttctgctatatctgaacagataatcgcttttgcaagctgctctgccttatctaatattaatacgctttctagcgtcgctacaatcatgagagacacctccgagtatccatcataccacatttagattagaactactaattgaagtgacttactcaaaagaaagatataacgtaactatttttacactatatccgtacacacttatacattaatatgttccgctatattatatttaagaacatcccattttccactattttgtttcacataactaatacacgcattttttaatggtgtcttaaatgtaatttcatctggttcaatggcatgtaaaatcgcttttatcgcgtgtgagtgagcaacaataataatacgtttgccaaaatgagttgtcgcaacatcttctaaagcagcaaagcaacgagctacaatctcttcatctcgctccataccttctactttaccctcagcaatcaactctctaacagccgcaaccggcttccctgaagcttctccaaaattccgttcaacaaatcgctcatctaataaaatcgattgtaatccaactgccgttgcgatttcattagccgtttcttgcgctctaattaacgggctacttataatgatatcccacgtttcttcttgtaaagcagctgcactttgactcgcttgcttcttaccaacttcattaagcggaatatcttctcgcccctgaataatttcttgaaaattccaatcagtttgtccatgtcgtactaaacaaatttccgtcatgctgcaactcctttttaaataatcaacttctattgtaacaaaagttctgcatgacggacatatttttcacttccaattaggttgcgttttgttgcttcatatactgaaacatatcaatcatgatcgaagcaacggccaattgattttgaaacttttccactttatctggtatcgtttttttgaaatgttgcatcgccgctaactcaaaagcctctttttcttcaggatttcgtgttaattttctataccagtacggttgctctctaatataacgagataaatcctcatcagcctttataaactccataatttctgctctcatcatctttccccctaatccttttgaaagaaaaacgggttattttctgaagtactttgctcttgctgcgtacggttaccttgaaattgctgaataacttgttgcacgctcccaattgcactcgtcacattggctaaatggttctgcatttgttccacgtccaactttttaaaaaaagaaagcatttgccccatcacatcagcagttttttcctcttcagttcgattatctttttcttttttattttcttttaccgaagaaaacgcaggcgctccatccggtctataagttgcccatattggatcttcttcaccaagtaagtaccattcttcataaaattgttgccatgttttgtgaccacttctaacctcatgaaccattttagggtgatggtttacaaattctttaaactgttgaaccgatggatgtaacggtccttttgttgttggcataatcctcacctctccatgtatatctactatatagtaagaaaaaaaaggcgcatggttcgcctatttttagacgattcatgcacctttttttctgctatttgcatacggtcagattcccacctacaattcagtgaatacgaagtaactaattaggtgatgtaacaccccaccgcttacagtttcgctttattttcgaataaagttttgtgtataaaatttatcgtatacaccaacacctaatcctgtaaattgttcatttaataaattctttctatgcccctcactatttaaccaaccttgcactgccgcaattccatcactatgttgcgccgctatgttctcaccagcaagttgaaatcctactttcccgcgctgcaaacgatctcctagtgtacctaatgtaggtgagtcatgagaaaaataattattgtctttcatatctttactgtgaccaacagcaacatctgctgtttcctgatcccatgttaataatggtaatttatgacgacttcgaatgatatttgttaaatcaaaaatttgttgcatattcccattttctacttgttttattttttctggagtcaatggttgttctgctattaattcacctgaataaacgagctgatacggtctttggcgtaataaagtttcatcatccatataacgaacaccaacaagctcatgtgtaaattgatcaaaatacaattgcgcccatccatcttctacaggtattaacggttgttccatgacttcggtatcagatagctcaaattgataactatttttccctctttttaatgaaatttcatgcgaaagcggactttttttatatacttcttcatatttttcatttatataataaggtggaaccttaacttgttcaccagctgcgtatgccgttacaactttacgttcagaaactccaaattgaacatactgagttaaatcctggttgtatacccaccattcatatccgtatgcagatggctctattcgagagggttctccccacttcgctaataggttttcagagtcttcaccaatcatatttaaaacagtgtctgaggagtcttccttaatttgctttttctttttcacaattttattttcttgctttgattgagatggggttaatatatattgtgaaacgagtaatttcccgtataaatcaacagctaaaattaaaaatgtaatcattacgatacgcaataatttcttcaaacgatatacctcctgaacaaaacataaaattgagatatacacaaatccttttctttctttttgtgtgtaccgtactcttttcactatatcatatttttgtgaaaaaagtctggattatcccttttctctcaatatgaattgcactttcttattattcatactattataaaaataatggtgtaacattaaaaaaggaggtattatatgcaatttacaaatacgaaatttaatggagccgtcgttgaattaactcttttaactgaaatcatggaaaacaaccacttcgtacttgccggacagtgggattatgaacgagttacatacgattataaatttgaaatattaaaggatgtttattatttacgagtgcaaggagttgctgttgaaggtgacattggcagtagacacgctgaagtaaaactactcccccccttattaggaaaacattattatcctcacggcgttgaatatggtgatgatgagactttcccaacgaatgtacttcaaaaaagcgaacaactcctacaaaatgtcgaaaaagagttaaaagaatttcaaattattgattaacaaaaacaagcgcatcaatatgatgcgcttgttttatttcccttccctaagaatgaatcgttttttttactggatatccataaatagatccatcttttactttaatctcatcttcccaggggaccttatatttaccttcagctaaatcttttacaaacgtatatggattttctttcaccccaccaggagttgctacatatcctcttgaacctaaattatatatattattttccaatccccatcctaatctagcctgatctgctagttctggatatacttcagcagtaacaatctcccaaggatttcgatgaccctgtactaaagtagtcccatcaaaattacatacttgtccttcaccaaagtaataaaatacaccatcataacccgctaagtttaccgacaatgtatacattaaattttgccatgcatttgaacgattcgttagcatccattgttcactaacttgtgtactatatccagaaatacgaattaagacatttgcacctttataggccgcttcacgagctacttcagggaacatgccatcatgacaaatacaaacagctaatttacttcctccaggtccatcacaaacaggtaagcctaaatctccagctttccaaggctcgactggcacccaaggatttagcttacgatacttcaaaatcatttcaccttgtggatcaataataactgctgtattatatggctctccaccatcaggatttttctccattattgaaaaaacaccatatactttagattctttacatgcctcagcaaataagtctgtttctggcccaggcactgtgcataaaaattcttctgtagtccatttttttgtattgagcccttgtgtactatattcaggaaatactatcaattctaaaccagggtaacctgatttggtcgaatgaattgtttttatgatttgttgaatttgtttatcaatgtctgcacgcgattctactactggtactggatattgaattagtgctgtcaaaaaaccactaatcggctttaccatacttccactactacccatttaaactcccccttaaaatagttcgtgtttattaaagataacaatatatatttgtaactctctaaaaaacttgcactacatatggaattattacgcatgaaagctagtagtaaattttatctccacttttagtacacgcctacactaacttaacataaaaagttagaaaattcaatctttttaaggtagctaaaaaagaaaaagcgcatggaatcccatacacttttttacttaatctgtaaatacggcggcaattgttgcaactgctccttatccttttcacgttctctacgtgcccatctaaagaatacatagcctataattgtaccgtacactatttcctggacaattttcattatgataccaccagtttgctgatcttgtacgactggcatccagtgcaaaaattctggtcccgttatatttaaatctgataaagtgcccgctggtacacatagttccatcgctttcatccaagcagccggatccgtatacgttgcaaataacggggctgtcgcaaaaatgattaacgcacatgcaggcgttaataatatgccgttagcaaacatataaccaagtttctttatatcacttaacgtttgatattctggtaatggatttaacatcggccaccacatcatgattgctgtaaaaaacaatatagcgagacaaataggatgagctatttgactttgttttactgtatcaaaaacaactggtaaatgataaaaagaaaacaggccgttaaatacaaacaacgcaataagtggtttagcaaatgcctttaatataatttgaacgaacttaaaagaagtaatgtaacgatataaccaaattggtataccaagcaacagtaacggtggaactgcaatatacatgactgccatttcaaacatatgagcactaaatataatatggccaattaaatcaataggccctccctttacaaaatataaaagaacaataccagtcgtaaaataaaaaatttgcttcttacttaccttcgtcgcattttcaaatcgcattctatatggtccaataattaagaagtacccaataagaatcgaaagcataaataataaaaagattggactccataaagcctgaaaaccaaatatccacaagttactcattttcacacctgccttcgtaaggttatctcataatatgaagagggagctgtgacaacacaagctcccttatttttcacttttcaaatccacacaattgtcataaaagctaaaattgtaattaaccctattagcagaccagagtaaagaaagaaacttgctgcttcatgtcctttatgactcatatgcataaaataatacaattgaaaaattacttgtaccactgctaatagtaaaataaacggtacagagaaaatcggactaaaagtttttggatacgctactgctacaaatgcaactaatgttaaaaaaatcattaatgcaaacgtaataacttgatgcctcatttcctccgcactttttctcttccgataaacaagatcaactttaggattattcgtttgctttatcgccattgtttatcccaccattcccattaaatatactacagtgaaaataaacacccaaactacgtcaataaagtgccaataaatcgatgcaacataaaacttcggtgcattgtataaatttagacctctcttcgcatttctaaagattaatgttaaaatccaacataacccaaacaatacgtggagtccatgtgtaccaacaagagcataaaacgcagagccaaaggcactacttctcatagtatgcttaaattcatgtgtataatgataaaactcatatatctcaaatcctaaaaaccctaaacctagcaatactgttactagtaaccaaagctgcattttcttaaagttaaagtttttcatgtgatacatcgcatatacactcgttaagctactcgttaataaaagcatcgtcataatgaaaacgagtggcatttggaacatctcttgagatgttggtccaccatttgtagaattctttaacgctaaatatgttccgaataaggaagcgaacaacactgtttcgcctccaagaaatagccaaaaaccgacaaacttatttttcccttcaagggttgctttttcaggctctgctggaaatgtttcattcgttaatttttcatctacatgcattatgccttgccccccttatcctctaaatcttctttatgaatatgatacccatgatcatcaattactgaacgtaggaacattgtgccaaatgtaatgattaaaccaataattgctactaataaccagaacttatcttttccgccctgcatatacatcgcaccaaatgccgctataaacaatccgaaagaaatgacaaatggtgaaaacgaaggatttggcatatgaatatcaccaactggttccgctgctgtcatttctttattaccttcacgtttttcaatccaaaacggatctaatccgcgaacaaatggtaattgtttaaagttatattctggtgtcggtgctggcattgtccattctaatgtacgtgcatcccacggatcacgaccagctttttcttttgatactgttgttttaattacattgaatagaagaacaatcgttccaagagccataaacaccgctccgatggaactaatcatattccccatttccaacccttgcccttcaagatatgtgtagtaacggcgtggcataccaatcaagccaaggaaatgctgaataaagaaagttaaatggaagccgataaagaatagccaaaacgttatctttcctaatgtttcatttaatactttattaaacatcagtggccaataataatgagctcctgcaagtaaaccaaatacaacaccgccaacgattacataatgaaaatgtgctactacgaaatagttatcatgaaattgataatcagctggtgcagatgctagcataacccctgtaactccacccattacgaatgatggaatgaaagctactgcccacatcattggtgtcgtaaaacgaatacttccgccccacattgtaaagagccagttgaatattttgataccagtcggaaccgcaatcgccattgttgcaactgagaaaatagcattagcaactggaccaagtccaacagtaaacatatggtgcgcccataccataaatcctaaaaatccaattaatacagtcgcaaacaccatcgatgaataaccaaacaatcgttttttcgaaaatgttgcgaagatttctgagaatattccgaaagctgggagtataagaatgtatacttctggatgaccgaaaatccagaataaatgctcccatataattgtattcccgcccaatgccggattaaagaaacttgttccaaataaacgatctaacattaaaagtcctaatcctacagttaacggcggaaaagcgaataatataagcgaagatgttacaaatgttgtccatgtaaacatcggcatacgcatatacgtcattcctggagcgcgcatattaataatggttacaaggaagttaattcctccaattaatgtaccaatacctgagatttgcaagccgagtacatagaaatcaacaccatgacctttagaggctaaagctaaagatgcataagatgtccatcctgcatcaggtgctccacctaaaaaccaacttaaatttaaaaatactccaccaaagaaaaataaccaaaatccgagtgaattcaaaaacgggaacgctacatcacgtgcaccaatttgaagtggtacagcggcgttcataaatgcaaacacgagtggcatagctgcgaggaaaatcattgttgtaccgtgcatcgttaatacttgattataagcatccccaacaagaaaagcgttgttaggaatcgctaattgaaggcgaataaatagagcttctattccgcctattacaaaaaacaatccacctgcaattaaatagagaatggcaatctttttatggtctactgtcgttaaataatcccatatgacagcacccatcccctgtttttttgctacagaactcacgttttcaacctccccttcgcgaatagtccctctttacttttcaacttttaacgtttgtaagtatgcatttaatgcatcaatttgatcatccgttaagttgccatatttgccagtcattttgtttcctggcttcatattttcaggatctttcagccatttttttaagttttcttcattgttttcggcaataccggcaaccatatcgcgatccgcaaagtttgctaagtttggtgcgatacgagcggaaggtggtctactatcattagatccaactgcgtgacaaccaatacagcttttattaaatatttcttggccctcttgcgcctttgttgaagctacttctttcttcccatcaatcttcttcatatcagcaagccattttttgtactcgctttcatctaaagctttcactttaaattgcattaaagaatgtgatgggccgcaaaattctgtacaaaaaccattataagtgcccgatttatctgcctttaaccacattttgttcacattgtctgtatttgtatccattttccctgctaaagatggaacccaaaatgagtgtttaatatcggcacccttcaaatttaaatacactttcttacctgtggggatgaccaaatcttgcgaagttactatcttttctgatttataagaaaattcccaccaataaagattcgctgttacatcaacaacgatagtatctttatcaatattctttttctccatcgcacttacatcagcaagtttgaatgtatatgtaactgttggaacagctaagattagtaaaagaataatcggaataactgtccatataatttctagcttgtgattcccttcaacttgctctggaatataatcttcctgacctttcttttgtcggaaacgcacaattacatataagaaaataatagtaactactagtactactcctaccatgattgcactcgccagtagaagtaaatcatattgcatttttgctacttctccttgcggaattaaagtagattgaaaggctttaccgcatccccctaacagtaaagccagcagtgaaacgaacgaaagcagtcgccactgtttcttcatacaaacaacccccactttccttgtgaattagattgtactttatagttaagtaaagtaaatctcaacgtaaagaaatccaattatgtcgttgtcttagaagaatgtaactacaatcattgatacaaataagattgttaaataatttagggaataaacaaacatttgcacggaccatttgatgtcatctttcttacggaagccataaaatcctaaaacgatccatccgatgttaagcagtgttgcaattaccataaatgttatccctagtccactcatataaaatggtagtggtaataaacatactgtccaaatcataatttggcgtttcgtaatttcaaatccatgaactacaggaagcattggaattcctgcatttcgatattcatcaacacgtttcattgctaatgcaaggaaatgtgggatttgccaaataaacataattaaaaataacatccaagcaattggatggcctaaagatggatcgattgctgcccatccaattaaaggaggaactgcaccagatatactacctacaacagtatttagtgtatactttctctttgtccataaactatatagaacaacatatgtgaaagcaccaataaatcccattaagactgccattggtgttgttaataataaaaatacaaaaccaagaagtaatatgactagtccaaatgtaagtgcaaatcctggtttatactttccagtaaccgttggacgggtctttgttctttccattaatggatcgatgtctcgatcaatgtagttgtttaaacaacatacccctgccataattaatcctgaaccaacgattgtaaagaataacttatccagattgtccattacacttaatccattaaagtgtaatgccaaccaaaatcctgtaaatacagtaagtgtatttgagtttacaatccccattttaacgagtgcttttaaatcttgtaaccgagttgtttccggtacacttgtaacagcggactcatcatgcagctcacttgttgcatggttcatcactctaaccccctcttaaaactttcatctttctttttgcgcctatttcaaatgaaataattcgcttctatatagcaatattattacagtagaaacattgttaacccattctactactaatctacgcccatactccaatatattaaatcatatttcccgaacattttgtgaagaaaacatgaactttttgtgtcgaatataaaaaacttcattctgacttgtccttatcataacatgatgttaccttctataataaactattttgtcctatttaacacgtattctccccatttcttttcaaaatagcctatttttcacccaaaattttccttgcgaaccctgtttttacacctattttctctccctttccttccccctccatttctttgctattttattattttttatatatcataggaactagcgcgttttattctatacataatggaatgaaaatatttcgcaataacttcatagcagaaagatggtgaaagagattgcaacgctttattaaatggttagcagtcattacaagccttgatttattaatagttttattaggaggcgctttagttacaaaaacaggttctggtcaaggttgtggtaaatcatggccactttgtaacggtgaatttgttccatctaatttatcaatggaaactattattgaacttagccaccgattaacatcaggatcagctggaattcttgtcactctactttgtattttgtcctggaaatattataaacatgtgcgtgaaacaaaaacgttagcaattttatccttcgtatttttagttgcacaagcattaatgggagcagcagcagttgtttggggacaaatgccagctgtacttgctatccatttcggtatttccttaatttcatttgcttctgtcattttattaacgtgtcttatctttgaaattgaccaaaaatttgatgcacgttcacttattatggacaaaaaaatgaaatttcatatttatggtgtaacaatttacagttatatcgtcgtctacacaggtgctttagtacgtcacgaacgagctagcttagcctgtccagactttcctttatgtagcaaaaacagacctatgccaactcaactacatgaatgggttcaaatgggccatagagttgcagcgatgttaattttcgcttggatactatacgcgatgattctcgctattcgccattacaagcagcaatctgtagtatattggggatggattatttcatttatccttgttacacttcaagctgtagtaggagttttagttgtatttacaaacgctagtttagcaatggcattgttacattctctattcatttcttgcttgtttgccgtactatgctatttagttatgctgggaacaagaagtaaagtgaatgccaaagaagccgaatcaacttctaaacaaacaaaataatttaaaactaaaatcccttgccaattcggcaagggattttttgcaataagaaaagagctgtatttacacagctcttttcttattttagtgatctaattcaataagtaaatcacccgtttgaatcgcatcaccatcgttaacatatactttcttcactttaccattgaacggcgcttgaactgtcgtttccattttcatcgcttctgtaattgccatagaatcgccttttttcacttcgtcgccttcttttacaactactttaattaccgttcctggcatcgttgcactaatatgatttggattctcacggtttcctttcacacgttgtgcaactgttgcttttacactctcgtctttcacgataatttcacgtggttgaccgttaaattccaagtaaagaacacggtttccatccgactgaggttctccaattgatactagtttaaccatcaatgttttaccctgttcaatttctacatcaatttcttcacctagtctcataccatagaagaacgtcggtgtatcaagtacagatacatttccataaagctcagcaactttttcataatccataaatacttttggatataaagcatatgctactacatcaaaaatcgttacttcgcgtccaagtttatggaataattcttcttttaacgcttcgaaatctactggctctagtaattcacctggtcttactgttaatggctctttcccttttaaaataatcttttgtaattctttcgggaaaccaccgtacggttgacctaaatcaccagagaacatttcaacaacagaccctgggaagtccatcgcatgtccacgctctaaaacatcttgttctgttagatggttttgaaccataaataatgccatatcaccaacaacttttgatgatggtgttacttttacaatatctccaaacatgtcattcacacggcggtacattactttcacttcatcgaagcgatctcctaaaccaaccgccttcgcttgttgctgaagattactatactgcccacccggcatttcatgcatatatacctctgtatgaggcgcattcataccactttcaaacggtgcatagtatttgcgtacatcttcccaatagtgagatagtttttctaaagaatctatattaacatctggttgtctttcgtttccgcctaacgcatagtatagcgtgttcgcacttggttgtgacgtttgaccagccatagaactcactgctacatcgacgatatcaacacctgcttcaattgccttcgtatacgttaatataccatttccactcgtatcgtgcgtgtgcagatgaattggaatcgacactgtctcttttaatgcagaaactaaatcatatgctgcatttggttttagtaagcccgccatatctttaatacctaaaatgtgagctcctgatgcttctaactcttttgctaaatttttataataatttaaatcatatttactacgcagtggatcatgaatatcccctgtgtagcacattgttgcttctgcaattttaccagtgtctcgtacagcgtcaattgcaactctcatgccttccacccagtttaaactatcaaaaatacggaatacatcaatgcctgcttgagcagaacattccacaaatttttgaattaaattatctggatagtttttgtatccaactgcgtttgaagaacgaagtaacatttggaataacacgttcggcattttttcacgaagatctagtaatcgttcccatggatcttcttttaagaaacgatacgcaacatcaaacgttgcaccgccccacatttccgctgagaataggttcggtaacattctcgctgttggctccgcaatttgatgtaaatcttttgtacgaatacgagttgcaagtaatgactggtgtgcatcacggaatgttgtatccgttaaaagtacacgtttttgatcctgtacccattttactaatccgtccgctccacgctcgtccaaaatttgtttcgttccattttggattggctctgaatgttttaaacatggaatacgagcatctgggaatattggtttttcttttttccctactcctgggaaaccatttactgttactgtaccaatgtaatttaacattttcgttccacggtctttacgtttcgggaacaagaacaattcaggtgacgcatcgataaatgaagtatcatattctcctgataagaagtttttatgctttactacattctctaggaatggaatatttgttttaataccacgaatacggaattcttttaagttacgttccatttttgcagcagcttgctcaaaagtaagtgcccaagttgtaacttttacaagtaaagaatcgtagtacggtgtaataactgcaccttggaagctatttcctgtatcaagacgcacaccaaaaccaccacctgatcgatacgccataatttttcctgtatccggcataaaattatttagcggatcttcagttgttacacgagattgaattgcaaatccatgtacaactacttcctcttgcttcggaacacctaccattttgctatgtaatgaatgtccatccgctattaaaatttgtgattgaacaatatctactcccgtaatcatttctgtaatcgtatgttctacttgaacacgtggatttacttcaataaagtaaaactcatcatcttttacaaggaattctactgttcctgcatttaaatagtttacatttttcgttaacttcacagcagcatcacaaatacgctgacgcagatcatctgaaagtgatacactcggtgcaatttctacaactttttgatgacgacgttgtacagaacagtcacgctcgtataaatgaacaacattgccttcttcatctgctaaaatttgtacttctatatgtttaggtttttcaacgaatttttcgacgtaaacttcatcattaccaaaagctgctttcgcttctgatttcgctcgattatatgattctcctaattcctcactagtacgcacaatacgcataccacgaccgccacccccaagggatgctttaataataatcgggtaatcatacttttcagcaaatttttcgacttcttctaatgaatttactggaccatcactaccaggtataactggaatttgtgctagctgcgcttgtgttcttgctttcactttatctccaaacatatctaaatgcttacttttcggaccgataaagataattccttcttcttcacaacgtttagcgaattgaatattttctgacaagaaaccatatccagggtggattgcatctacatgattactttttgcaatctcaataatgccttcaatatctagataagcatcaattggtttttttccttccccaactaaataggactcatcggctttatagcgatgataagaaccactatcctctttagaatagattgcaactgtttttaatccaagttccgaacaagctcgaaacacacgaattgcaatctctccacggttagctaccaatactttttgaatacgttgcagctttgtcatgattttccccctctactttcctaccactctagagataaaatatatacacaccttaaaaagcgtgaagttcttcactttccacattatattatacttagaaagcttcactttatttttatccatcataccttattttctaacaaatgataagttttctgtgcaatttgtttcacaaaaatagtatagcatacctcttccttttctaacaacttaattgtatatcacatttaacttaatgtgatataccttttaactgaaagagaaattagtacatcatatttaaaactacttaaaaataaaaaacacatcatgctctaaagcacaatgtgtttttattttacaactacaagatgtggtccattttgttctctttctttcattacaccattctgttgtttctcttgtcgtttcacgtgactagcaatattaagtagtattcccattgcaagtagattagctattaaagaacttccaccataactaataaacggtaaaggcactccagtaagcggtattaatccagacataccaccaacattaacaaaagtttgtactcctattaaacttgcaattccgattgcaattaaacttccaaaaggatcgttacatttttgagcaatcctgaatgaacgaataataataagtagcaagcaaattaaaataatagctacaccaataaaacctaattcttcagatataatagccataataaaatctgtttgaggttctggtaaataaccatatttttgcacactatttcctaatcctcgaccatttagccctcctgaagcaattccaataaaagaatttactaattggaatccatcattctgaggatcattgaatggatcaagaaaaactgaaaaacgtgccttttgatatccacttaatttataattagccaaaaaatatagagctggaatccatactatagaagttaaaacaattcgtttaatccataaattaatccttactcctgaacaaagaaacataatccctactgttcctgcaattaacaaatcggtacctaaatcattttgctttaaaattaaaaacattgccattccaacaaaaccaagtgtaagtcccgaccctttaaaaacaggtgtatttgtttcttgtctccttgcaaaaaagcgagctaatataataataatcgataatttaacaaattcagcgggctgtatacctaatatccaaccttttgcaccatttatttccttaccaaaaatcaaggctgctgctagtaaagcaatactccctagccccatcgccgataaaattattcgttttctccaaaacttataaggtaacgaagctacaattactaacaataccgttccaatagctaaagttattaattgttttttaaaaaagtaatttgccggccagttatgcctcgaaatcgcaacaatggaactagaactatataccattattactcccagcacacataagataacaagaggaagtaataatgaataatccattgatttccatacttttttcatttcatttcctctttctgtttcaatttaattattgttgtattccatatgtacattgattcttcctgctttattatacaaataaaaagctcaaactaatttagtttgagcccccttatttgaacccgttattgttgtttgtttgtaaatgcttcatgaagtgcagataactcacgttcgagctcacctaacattgctttcccttgttcttctgcaataagaccaaggcgaaccgcaaaatcgacctcgcgggatagtccaaacatttgtgtgtctaacacttcttcatataatggacattgcggcattgtaagatggtccatttgcaccttaataagtcttaaaatcttctctgcatccgcttgtagaagggctagtgccttttcctgatgatttgctactgtctcagacgccaaattgattccctccgtttccgtcctactctcctctatcctatctattaatattagcgatagttttaataaattgcaatagaaacattttttgtgacaacagtgtctaatactattatactgaaaagtgggagtataacacaaatgggggaacaacaatgagcgaaattttatttattaacggaaaagtacgttttccaatcactattgatccaactgtttggatctttgatgatcgaaaagtagatttgacaacttactttgatgaaactagagaaaacacgtctgaactagaaacttatttaaaaaacacttcagaacattgggatcgcgaaatccgtgatggtgccgcttttcctccaatacaacaaagtgtgaagaaatataaaaaagaacagctgattactggaacatttggtataccatttcatccatttcttgctaacgctgaaattttagaggacgctaggcaagttgaaattgaaacggtagatcatacaatgacacttccattagaaactgtcaaaaatgctatactaggcttttcaaaagaaggaaaaccattaaaagaagacgggcctgttcatctctatttcaatgatggatctaatcaacaaaatccaatccgtaacatccgtaaatttacaattatttaaagaaaaggagtgagcttaagctcactcctttttacaataaatctgctgctagttgagctaaattagatcgctcccctttaacaaacttcacatgaccactaatacgctgttctttaaacttctctacaacatatgttaagccattattatattcatctaaatatgggtgatcaatttgctgaggatctcccatcaatacaatcttactcttttcccctaccctagttaatatcgttttcacttcatgctttgttaaattttgtgcttcgtcaatgataatgaactgatctggaatacttctcccgcgtatataagtaagggcttctacttcaatcgaacccattccagctaaaatagcatctaactctcctggctttttcgtattaaataaatactctaggttatcaaaaattggctgcatccatggtcttaacttttcttctttttctcctggtaaataaccgatatcttttccgactggaacaattggtcttgccacaagtaattttttatataaccctaagtcttctgtttgcataagtcccgaagctaacgcaagtaacgtttttcctgtgccggctttccccgttaacgttacaagcggaatatcttcacgaagcaacaattctaatcccataatttgctgcacatttcgtggtcgtatcccccacacttgttcattgtgaaaaataagtttctttaccttcttacctaagtgatccacaatgccaagagcagaactagagccccctaatgcatctttcatcactacaaactgatttgggtaaaaaggatgattcgcaatttcagatagaggcaattcacctttctcataaaaataatccaattgttcttttgatatatatccttctaaaaagccagaatatatattttctacttcaattacgcgatcacttaaataatcttcagccttcaaaccaattgcatcagcttttacccttacgagcacatctttacttaccaaaataacagacttcccgtcctctttttcctgttcttctaaagatagattttttgctacagctaaaattcgattatcatttgttttttctacaaaaatatcttgtagttgcacgaatgaacgatggttcaattcaatacgaaatgttccgccgttttctagcgggatactttcatgcagctttcctatttcacgaaatttatctattaacttagatacataacgagcgtttcgtcctacttcatccatataacgttttttcgaatcaacctcttctaatacaactgctggaatcactacttcattggtttcaaatgaaaaaatagataaaggatcctgcaaaagtacattcgtatctaacacataaattttatccaacctgttaccccctgactccacttttaaatttgtagaacaagggtttcatccatacaatatggacgaaccattgttataattatatgtaccgtgtaaacgaggtagaatcgaaaatcatagtcattaaaccttttatttattctttattcatttctattcaatatattactttttattataattattaacgttaaatcacaataaccgattacaaaagtgaataaacgaatttcctatttagcatctttataattctcttatccctactaacacttcattatccagctttttcgctgcccgaagatcatatgttttttcatatgttggttcaattgcaagtttcgctccataaaacataacatcacgcacttcttgcacatttacttctattacagttaattttagagaaataccttccattctatctgtcaaaatttcacctgcaccacttatagaaaatacggattcattcgccattatagtcaataccacacctgtattatgccgtatattttccacaatacgtgaacgttgatctactgcaaatcgaatactagttttactcactgcatacacccaagaaatagcacttacgttaggaacttgcttttcgaaatctgccgttgctatcataacaatacactctttacgcaacgtttgtactaaatcctctgttaaggtaggctctactacattcgccatattttcacctccaaacatacttggtatatccttatcataacttattttttgaattgcgaaaatattattttttcccactattattcaaaaacattatacttccatgatatacttatactgatagaattcgtattgaggtgacgaaatgagagtcaaatgtatgatttgtgataaaaaagatatgttagatgatgaaaatcctatggcaaaaaaactgcgtaatcgccctattcatacatatatgtgcatggaatgttcggaacgaattgcagagcgtacaatggaacgtcatgcaagtggtaatttccgattatatcgtgataaaaaaatcgaagatgattggtaaaatgtaaataagtccttactcatatagataaggacttatttatatttttctggttcacgattcatctgatccaaaaaacaatcaatggcttctaacggaaaccttgcagatttccgttctccattcatttcatatgtaattaaatacatttcctcgttcttttcgacttcaacatttcttaatttatgttcttcatatatcatattttgaaataacaaatatgtttcttttgcagcactatcatctgggcgtgcttccgcaactgttttaattgttaaccaattatatagtgcatcttgtactgaacgcatgaaaactccccttccttatcctgctttttgttgtttcgcttgacgcaaacgcaatctataaattccaagtacaattgccgctacaacaagtccttctccaacaggtaaaaacacagcaaaaaaggttaatactgtgcatccaattgctaatgatatgtatatcacaatattttttagtacagacaactttctagcaaaccctaaattataaacgagagcacttaatataataatcgtcccataaagtaaccacattcctaactctggattttcatctaccttacacaattttgcaaaaaaagacatcctttctaacacactcttcccccctagcagtaaaatgcaattttctttatacacttaatacaagagtaactcgcaaaaaaaatactgtccacaaaaatgagtaaatattctaaaaaataaacaaaataaaaaaacaacgccctttataaagggcgttgtttttttatttttacgcttcgacagatttctttttcttagcagctctttcgcgctcactcttatcaagaatctttttacgtagacgaattgattctggagttacttcacagaactcgtcatcgtttaagtactctaatgattcttctaaagtcattaggcgtggtttcttcattgttgaagtttgatctttcgtcgcagaacgaatgttagtttgttgtttcattttcacaacgttaactgttaagtcattctcacgagtgtgttctcctacaatcataccagcatatacttctgtacctggttcaacgaagattacaccacggtcttcaacttgcataataccgtattgtgatgcttttcctgtttcaagtgaaactagaacaccttgacgacgtccaccaacttgtccagcgtgtactggttggtagcaatcgaatgtatggtttaaaataccgtaaccacgagttaatgttaagaattctgttgtgtaaccaattaaaccacgtgctggaaccatgaaagtaaggcgaacttgaccgtttccgttattcaccatatctaacatttcacctttacgtgcacccatagattccataatagaaccagtgtattcttcaggtacatcgatttgtacacgctctacaggctcacatcttacgccatcaacttctttaatgattacttctggcttagatacttgtaattcataaccttcacgacgcatgttttcaattaagatagataaatgtagttccccacgtccagatacgatccacgcatcaggagaatctgtattatctacacgtaaacttacatctgtttctaattgtgaacgaagacgctcttcaattttacgagatgtaatgtatttaccttcacgacctgcaaatgggctgttatttacaaggaacgtcatttgtagtgttggctcatcaatacgtaataatggtaacgcatcttgatgttcaactggacatactgtttcacctacgttaatgtcttccataccagaaacggctactaagtcccctgcttttgcttcttcaatttcttgacgttttaatcccatgtaaccgaataatttcgttacgcggaattgcttcacacttccgtctactttcattaaagcaacttgttgtccaaccttcattgtaccgcggaatacgcgaccaactccaatacgtccaacgtagtcgttgtaatcaagaagtgctacttggaattgaagtggctcttcgctgttatcaattggtgctggaatatgttcgataattgtatcgaataatgatttcatattctcttcttgatttgctgggtttgaatctaagcttgctgttccgttcattgctgatgcaaatacaactgggaactctaattgatcttcgtttgcaccaagctcaatgaataagtcgattacttcatcaactacttcatctggacgagcgaagtcacggtcaattttgtttacaactacgattggagttaagttttgctcaagagctttctttaaaacaaatcgtgtttgtggcatacaaccttcatatgcatcaacaacaagtaaaacaccatcaaccattttcatgatacgttctacttctccaccgaagtcagcgtgaccaggtgtatctaaaatgttaattcttttatcttcatagtgaatcgctgtatttttcgctaaaattgtaataccgcgttctctttctagatcatttgaatccattgcgcgttcttcaacgtgttcgttcgcacggaaagtccccgcttgacgtaataactggtcaacaagtgttgttttaccatggtcaacgtgggcaataattgctatattacgtaaatcttgtcgttttttcaacatgtccaactcctaatgtctttttaatccttctctattataagagcgaaggggatacaatagcaattaaaataaaagcaagaatgaaaatatagttgtattcttacttttgtgaaagtaaaatgagattggagggtgaagaaatggaacacattcaatatcgctttttattaactgcaattatcggtgttattttcttaatcggtatcggcattatgattgctgaaaatagtccaatcggtattattatttgcattatcggcacatttgttacagttggatacggttttgtaacaaaaagaaaaatgcgcaaatcacaataacgctaaaaagtaagaagcttatacacagcctcttactttttttgttgctctcatataaacgataacacttcttcatacactcctggttttgcaactaacacactgctcttctctatgatagaaagtggcgctccagagaatgtcgtcaccttacctccaacttcttctacaattatctttcctccgccaaaatcccatggtgataatctcggcgttacatatgcatctattcttcctgttgcaacgtataccatctctaacgctgcacagccatatgatcttgtgcctcttgctttcttaacaagtgccatcatactttccatattaagcaatggattatctgtaagccatatcgcatttaaagctacaataccttgctctacagttccttttttcagtgtaggaattgatatatcattacaaaaagctccatatcccttgactgcatgatatagttcatcatgcactggatcatatataagtccaatctttccgataccgttctcataaatcccaattgaaatcgcaaaatttcttttttgatgaacaaagttcatcgtgccgtcaattggatcaattaaccaaacaaccccgtcagaagacgttatctcgtctccataaccctcttctcctaaaatattatgattcgggaatgtttctttaattttcccaattaaaaactgttctatctctcggtccatatttgtaactaagtcagctgcatttgattttgtttctataataagtgcttttttcattgatgccattaaatgctctcctgcatcccgaatccaccgtttggcgtgtgcatcaatgtctttccatacttcttgcatgtttaaacactccgatctatactgttcacagaaaaaacgaaccctttataaggttcgcaccaactaattttttatacatatactattattacgcttctaaacgaatcatttcaagtcttaacacttctaacttttgtacacactcttcttttttctgtttgtcatcttccatcatcgcatcatataaagttgctaattcataatctagctccaaacgtagcaccggtattctcttttcagcatctgttctctttaacgcattaatcacctgtctcatattatttgcctcctcccaatattcgtctgccctcggactagaattaattaaattttctgattttttgttttatactatactatgttggataaatcatctatgcaacaaaattatatttttttatttaaatttttttgtgctgttttttttatgaatagtacaagctatgctaaaataaaagcaaaataggagttggaggaacaatcatgacaatacaaacattcaagtcaactgattttgatgtctttacagttgatggtctcgaagaacgaatgagtgcaattaaaacgaacattcatcctaagctagaagctttaggggaacaatttgcagaatacttatccaaacaaactgatgagaactttttttatcatgttgcaaaacacgcacgccgcaaagtcaatccaccaaacgatacttgggttgctttttcaacaaataaacgaggatataaaatgctaccgcatttccaaatcggcttatggggtactcatgccttcatatactttggtttaatctatgagtgtccacaaaaagttgagacggctcatgccttcttagaacatttaaatgatttaaaaacaaatattccaaatgacttcgtttggtccattgaccatactaaaccaagtgtgaaattacataaaacacttgaaaccgaagacttacaaaagatgattgaacgattagctactgtaaaaaaagcagaattattagttggtattcatatatcaccagaggagttttcagcaatgaccaacgaacaattccttgctaagattgaatctacgatgcaatcactccttcctttatatgcactgtgtaatcgatagtagaaaacggacaatttatattgtccgtttttagttgttatcacattatatcacttcagtttttatttttcaaaatattttttacatttttacgagcttttgttcttcgacttcttttgccctttgaatagcacgatatatagagtatccacttacttcttgaaattctttatcaattttcttttcttctgctttcgatggaacaatctctttaaaacgacgatataaacccattaactcttctcttataatccctttttcataagctttctcaatcgcttcataaaacttaacaattgtaaccatttcctcatttgaccaatcataatctaacggatattgatattccatttcgcacctcatttatcatttcttcttgtttcattatgctatcttaaagagaatattttattcttcattatagccactctgcattatacactatttattcattttaatggaattgtcttcctctattcattagttgaggctaactattaaacatactcaccttaaaaacatttttttctatacatctataattattggtgatataatgcttttgttttatagaaaataaagtgaagctaccatctcaaaaacgattttttgaatggcagaaaaacaagccttattctaaaaaaggctacacttttttagagcaggattatataaaacaaattacactaaatattatgaagaagaaggggtgtatagattgtcccaatacgaaacaccattgtttaccgctttagttgagcacagtaagcgaaatccaattcaattccatattcctggtcataaaaaaggacagggcatggatcctacatttcgcgaatttattgggcataatgcattagcaattgatttaattaatattgcgccactcgatgatttacatcatccaaaaggtatgattaaagaagcacaggatttagcagccgctgcattcggtgcagatcatactttcttttctattcaaggtacaagtggcgctattatgacaatggtgatgagcgtttgcggtcctggtgacaaaatcctagtaccacgaaacgtgcataaatcagtaatgtcagctattattttctcaggtgcaaaaccgattttcatgcatcctgaaatcgatccgaagctcggtatttctcatggaatcacaattcaatctgtcaaaaaagcactggaagagcactcagatgcaaagggcttacttgttattaacccaacgtactttgggtttgctgcagacttagaacagattgtacaattagcacattcttataacatccctgtactagtcgacgaggctcatggtgttcatattcattttcacgatgaattacctatgtcagcgatgcaagctggtgcggatatggcagcaacaagtgttcacaaattaggaggctctttaactcaaagttctattcttaatgtgaaagaaggcttagtgaatgtaaagcatgtccaatctattattagcatgcttacaactacatcaacttcttacatcttgttagcatcccttgatgttgcgagaaaacgtcttgctacagaaggaacagcactcatagaacaaacaatacaattagctgagcatgttcgtgatgctataaattctattgagcatctttactgtcctggaaaagaaatgttaggtacagatgctacctttaactatgatcctacaaagataattgtatctgtaaaagatttaggtattaccggccaccaagctgaagtatggcttagagagcaatataacattgaagtagaactctcagatctatacaacatactatgtcttatcactttgggagatacagaaagtgatacaaatacacttattgcagctttacacgatttagcagcaacatttagaaatagggcagataaaggtgttcaagtacaagtagagattccagaaattccagtgctagcactttctcctcgagatgctttttattcggaaacagaagtcatcccatttgaaaatgcagcgggtcgtattatagctgattttgttatggtttatccgccagggattccaatctttactccgggggaaattattacacaagaaaacttagagtatattcggaaaaacttagaagcaggtttacctgtacaaggtcctgaagatatgacattacaaacattacgtgttattaaagagtacaagcctatcagttgataggcttttttttcaccttttttccttttcttcatacgatacttaagaatgtaacgtataggtggggatactattatgattgtaataggccgttctattgtacatccttatattacaaatgaatatgagccatttgcagcagagaaacaacaaattttatcaataatggcaggaaatcaagaagtttattccttccgaacagctgatgaactcagctttgatctcaatttacgagttaatattattatctctgcactagagctttttcaaagtggatttcagtttcgcacatttcaacaatccttttgcaacccccagtattggaaaagaacatcccttggaggattcgagcttcttccaaacataccatcttctattgccatacaagatatttttaaaaatggaaaactatatggaactgaatgcgcaaccgctatgatcattattttttataaagctttactatcattgtatgaggaagaaactttcaatcgtctatttgcaaatcttttactttatacatgggactacgatcaagatctaaggctcataacaaaaaacggtggcgatcttgttccaggtgacctcgtttactttaaaaacccacaagtgaatccagctacgattgagtggcaaggagaaaacacaatctatttaggaaatttctttttttacggacatggcgtgggtgtaaaaacaaaagaagaaattatttattcattaaatgaacgaagagtcccttacgcttttatttcagctttcttgaccgatactattacccgtatcgatagccgtataatgagccaatatgcttcttctagtacaccacagacatccataagctttattccaattagagatgatgcaatcgttgcaacagttggtcatacaactacaatttattaaaaaagcgcctacacatgtaggcgctttttcttattattaagcttttgtatgttctttatggtcacattcgcaatgagatccacatttcccgtatagtactgttgatttttcatcttcaaaatgtccaattgttccttcacatacttggcatacgattgttcccattttcatttccccctaagtttatggtcctaaaaacttttagctgtccatttcctatcaattattgggcttttgtatgctctgtgtgatcacatccgcaagatccacatttcccgtaaagtaccgttactttctcatcttcgaagtgtgcaattgtaccttcacaatcttgacatacgattgttcccatttttcatttccccctaagtttataatcccaaaaactttttgtaaccgcttaactttctgtctttattttaatatgttatactttttacgtcaataggtttttagtataacacattaaatatttttaatttaaattagtatgcgatattaaaataaaaaaacagccatatttataagtacgactgtttcacattaattattcttcatattccgcatgtaaagaagttgacggaactagaaatttgaaaaactgagctaactcctttgcttcctcttctgatcctaatttaaaaatctcctgtatatattgaacattctctacatcatctcgtccgagtaaagtagaccttcctgtttgcatacaaacaatgagcggctttccaaaaaacatatttgtataaataacaccaaaatcataacgtgtatcatgtgtcataaaccctaaaaatcgtaccttcacactttcatgctcatcatacaatttttcaaacattggtttccacctttctacatcacgtttcattaatagtatattaaacaaaacatgtaatactccttttaattgtcaaaaaattcagtaggatgtagaatgatagtattctactaagctagggggaacttatatgcaacacgcctttattacgcttgtaccgaaatccaaccaacaatcagtttcaatagatgatataaaacaactttttcattattataaaacagttacttctaaaactggtgcccaaattaattacacgtatacaaataccgcttttccttatgaaattttagatacatctacaacaacattaaaacttcaatccactcacgaccggtatgactcaatttatattggtgttggtatagaaaatgaacaatctttcatccaagtttctttaccacctaatgcaacatttggtgacaaagggaaagcaaatgaattttgccgttttttagcgaagaaattagaaggagagttacaattatttaatggaagaacaatgtatttttataaacgctaatttaaaaaatagataatatgattaaaaataatatacaattcgaacatgtaagaaataaagcttgctttcttacgtgcaatacaaaatatgctattacataggctaaatatagaaatacgaaaaaaagaataactttataatgaaacttatcaccattcgataatgttaatacagtggaaaagccactccatagtagtaaatgataaaatataacatgtaatattttcatggaaccttctcctttgacatgctctattttattaatatatgggggtaagtttgaatcaattacatattataggatgatatatattaccttcgaagtaagttaagcctgaatcatttgttaaagtattatatattcattcgacaagtacgtttaaagaccttgcaagtcatttgatgaaaataaaaatagcccctctcttacaataagagaagggctatttacattacttaaattattttacaatgtgaattggcattccaagagcaacttcagctgcttccattgtgatttcacctaatgttgggtgagcatggattgtttgagcgatatcttcagctgtcattccagcttcgatagctaaaccaatctcagaaataatatcagaagcacctgcacctgcaacttgagcacctacaagaagaccatcttctttacgtgttacaagttgtaggaaaccgtcagtgctgtttaatgataatgcacgaccgttagcagcgaatgggaacttagatacagttacagtcattccagcttcttcagcttgttttttagtgtaaccaacagatgctagttctggatcagtgaagcatactgcaggaattccgatgtaatcgatagctgatgcatggccactaattgcttctacagctactttaccttcgtaagaagctttgtgagctaatggtggtccaggaacgatatcaccgattgcatagatgtttggtacatttgtacgacattgctcatcgatttcgatgatgccgcggtcagtcattttaactccaacttgctcaagaccgatttcttgagtgtttggacgacgacctacagttactaatacgtaatctgcttctacagtttggatttcacctttaacttcaaagctaacttttacgccagtttctgtttcttcaacgcctttagccatagcttttgtatggatatttacgttaccttttttctgtagagcacgtttaacaacagagctcatagctttttcgaaaccagctaagatttcgtcgccagcttctactacagtaacttctgtaccgaagttagcatatgcagtacctaattccataccgatgtaaccgccgccgattacaacaagttttttaggaatttcaggtaagcttaaagcacctgtagagttgataacacgtttagagtatttgaatcctggaatttcgattggtgtagaaccagttgcaagaacagcatttttaaacgtataagtttgagctgcatcttcagtcataacgcgtaatgtattagcatctacgaagtaagcttcaccgcgaatgatttcaactttgttacctttaagaaggccttcaacaccgccagttaatttcttaactacgccgtttttccattcttgaacttttgtaaagtcaacttttacgttttctgcagtaatacccatgtcatcagaatgcattgcattctcataacgatgacctgcattgattaacgcttttgaaggaatacatccaacgtttaagcatacgccaccaaggttagctttttcaatgattgctaccttttgacctaattgtgctgcacgaattgccgcaacgtatccaccaggacctgcaccaacaacgactgtatctaattcaattgggaaatctcctactaccattgttattacgcctccattactaataattgtgggtcattcaatagacgtttaatttggtttaacgctttttgagcagttgcaccgtcaattaaacgatggtcaaagcttagagataatgctaatactggagctgcaacgatctcaccgtttttcacaactggtttttcagcgatacggccgataccaaggattgctacttctgggtggttgataactggagtgaaccattgtccacctgcagaaccaatgtttgtaattgtgcaagaagcacctttcatttcagctggagctagacgaccttcacgtgctttaccagcaagatcattgatctcgttagagattgtgaagatagacttacgatctgtatctttaacaactggtactaatagacctttgtctgtatcagctgcgataccgatgttgaagtaatgtttatgaactacttcttgagatgcatcgtctaaagaagtgtttaacattgggtattcacgtaatgcagatgttaaagctttaacaacgtacggaaggtaagttaatttaatacctttgtcagctgctactgctttgaacttcttacggtgagcaacaagttctgttacatctacttcgtccattaatgttacgtgaggagctgtgtgtttagagttaaccattgctttcgcaatcgctttacggataccactcattttctcacgagtttctggatattcaccagctgggattggttgtgcttttggtgcttcttctttcgctgctgctggagtagcttctactgctgctggagcctcagttgctgctacagtttgtccaccatttgcaaatgcatcgatgtcagcttttacgatacggccattcttaccagtaccagctactttatgaatgtctacacctttttcacgagcgtatttacgaacagatggcatagcaattacgcgctcatttactacttctgcagttgctgctggagtagcttccgctgctggagcttctactgctgcttcttcagcttttggagcttcatcatgatcgtcacctttaaatttaaggttttcgtatccaggagcatcaaatttaattaatgtatctcctacgattgcaactgttccttcttctacaagtacttcaagtactttacctttaacaggagaagggatttctactactgctttatcattttgtacttcaagaagtacatcgtcttcgtttacttcatcgcctggtttaataaaccattttacgatttcaccttcgtggataccttcaccgatatctggtagtttaaattcaaatgccacggaattcagccccctgattcatttcattattatggaatatgtacaaaagaaaccagcatgtgctgatttcttttgcacatgaaaagctaaaaattagaagttcattactttgtttacagcttcaacaatatctttgtggtttggtaaccatacgctctctgcttgagagaatgggaatactgtatcagcagctgcaacacgtacaactggagcttctaagtttaagattgcacggtcgttaatttccgctacaacgttagctgcaataccagcttgtttttgagcttcttgaactacaactacgcgacctgttttttcaacagaagcgatgattgtttcgatatctaatggttgaactgtacgtaagtcaacaacctctaaagagataccttctttttcaagttcttcagcagcttttaatgcagcgtgaaccatagcaccgtaagcgataacagatacatctgtaccttcacgtttgatatcagctttacctaaatcaattgtgtaatcaccttctggtacctcttgacggaatgaacggtacaatttcatatgctctaagtagataactggatcgttgtcacgaatcgcagagattaaaagacctttagcatcgtatggagtagatggaataacaacttttagaccaggttgttgagccactaatccttctaagctatcagcatgtagttcaggagtatgaacaccaccaccgaatggagaacgaactgttactggagcagtccaacgtccaccagaacggtaacgcatacgagctaattgaccagaaattgaatccattacttcataaacgaaaccgaagaattggatttctggaactggacggaatccttcaagtgcaagaccaactgcaagtccaccaataccagactctgcaagtggagtatccattacacgatcttcgccaaattcagcttgtaaaccttcagtagcacggaatacaccgccgtttacaccaacgtcttcaccaaatacaagtacgttagggtcatttttcatttcaacgcgtaaagcatcagtgattgcttgaatcattgtcatttgagccatggcttacttcgactccttttctttgtagatttcatattgttcagctaagttgtaaggcattttttcgtacatgatttccattaaatcagttactttttgttttggagcttggtcagccttagcaattgcttgtttgatatcttcttttgcttcttcgattactgtctcttcaacttcttgagaccataggcctttagcttctaagaacttacggaagcgtacgattgggtctttttgttcccattcgttttcgatatcttttgtacggtaacgagttgggtcatcaccagccattgtatgtggaccgtaacggaatgttaaagtctcgattaaagtagggccttcgccatttactgcgcgctcacgagcaaaagcagttgctgcgtatacagctaatggatccataccgtctacttgaattccgtaaatacctgctgctactgctttttgtgctacagttttagctgcagattgcttttctactggagtagagattgcataacggttgttttgaacaacgaagattgctggagctttgaatgcacctgcaaagttcataccttcgtagaagtcaccttgtgaagcaccaccgtcaccagtgtaagtaattgcaacagattttttaccacgtagtttcatacctaacgcaacaccagcagtttggatgatttgcgcaccgataataatctgtggagctaatgcatttacattctcaggcatttggttacccatgaagtgtccacgagagaataagaatgcttggtataatggtaatccgtgccatactaattgtggtacatcacggtatcctggtaagatgaagtcttctgcttcaagtgcgaaatgacttgctaattgagaagcttcttgtccagctgtaggtgcgtagaaacctaaacgtccttgacggtttaaagaaatagaacgttgatctaatacgcgagtatacaccatacgacgcattaattcttttaattgatcatcagataattcaggcatagctgcttcattcacaacttcaccgttttcatttaaaatttgtaatgtttcaaattgagctgcgatagctttcatttgctcatcaacattaaatagggtcttttttgttttagtacccattccgttcacctcttcctctcttgaaccatattctgaaacgctttcactggctattttccagtttaaaaagcgcaacgatgtaaaccaacatgtttgtatgtcggttgagaataattttgtgtacctaacaatctgtactaatgttttttcagaaacatattaatacaatcttgatcacgttttttagtttacaactattctaattacgatgtcaattactttgaatacgtttttttataaataatatgcaggtttctactacacaaacgtgtttttattttttacatctgtattagtaagcattgacctactgttatattattccctttttcacttattttttctcttagaataatatgtaaacgatttaattctctttagtttttctctcttcgtaacaaaaatatacaaactactcttccttttttaggtaaatacctatacatttctaccctctcttccatacattatagtaaccgcagtattagcgggaaatgataaaggaggtcatctcatgtacggatactcatattgctatccaacttgttcatatccttcctacggttatggcggttcttgtggcgggtctggacgcggcttcgccttaatcgttgtgttgtttattcttttaattatcgttggtgctgcttgcattcgctaatgtaaaacgaaacaactatggaaagaaaaagacggctttgctgtctttttctttttatcacatacataactactctataatagaacaatttccaaaatgccttccctttcttgccgatgactttttccatctcctttggtagactaaagaggaaaggagagattacatatgcttacaatgaaagatgttattcgcgaaggagatcctattttgcgcaacgttgcagaagaggtgtcattaccggcaagcgaagaagatacaactaccttaaaagaaatgattgaattcgtaataaatagccaagatcctgaaatggctgaaaaatatagtttacgccctggaatcggattagcggctccgcaaatcggtgtttcaaaaaaaatgattgcagttcatgtaaccgatgcggatggtacattatatagccatgcattattcaatccaaaaatcattagccattctgttgaacgtacatatttacagggtggtgaaggctgtctgtctgtagaccgcgaagtacctggttatgttcctcgttatacaagaattacagtaaaagcaacttctattaacggagaagaagtaaaattacgtttaaaaggtttaccagcaatcgtattccaacacgagattgatcatttaaatggcgttatgttctatgaccatatcaataaagaaaatccttttgccgctcctgatgattccaaacctctagagcgataataataaaaaggcggaagttaatcttccgcctttttattatgaaatgggttccatattcacttatagcaatccagcccactttagtccatgatatataccgtcttcattaacatcctttgtcacatgatttgcaagttttttcaagtcttcatggccatttcccatcacaatacctgtgccaacggcttcgatcatttctaaatcatttaagccatctccaaatgcatacacttgatcacgattaaaacctaacttttcaatgtatttctcaattccttttgccttagaaccaccattcggaatgatatccattgaatatgcatgccaacgaataaaatgaaaatctggataatgattaataaacttttcctcttcatttacttcacaaaaaagtagtgtttgataaatattacgttcctcataaaaattaggctcatatgctggatgctcaaagtttaagcttccaaagccttctttcacataatcatgatattccactgatgctctcatatcttgatggtcaagatatacaagtggatatccttcttgttttgcaaactgagtaaacctatgtaaagcatctggatgtaacggattattaaatattacctcatcttcaaagacaacatattgtccattaaaactaacataattatgtatattaagttccctgcgaatatcttcgaacataaatggcgcgcgccctgtcgcaattgctacatgtacacctttttcttgtaactgttttactgcatctcgtgtagattgcggaatttttttatcatgatctaataatgttccatcaatatcaaaaaagacaattttatcattcatttgtcaaaatcctttctgggactctatattcctattttgaatatcacttttcaaattctaaaaaaaagtataacatattaaacatctgtgaagaaagcgttccctttctgaccttatttgtaaactttgcatatatatattagtaaaacatgtagatacttgttcggatgaattttcttttccattcttcctcatactatacctataactaacggctactgatcgttactatagaataactttcactgtatgggaaaggacaagattcaccattcacttttgtcctatctcttatatcagagatagagttttcactagtaataggcatgtttaaaataaggaaaggaaggagtaatcatgctgaagaagctgaagaaaaagctcaagcgttatttaaacggtctagtccgtaaaaagacaatcgcttaaattgtgcccatttcgggctttttcttcattctcattcgaaaaaacatgaaaatcgtgactgtttgctttataataagtaacagataatgcaaaacatagacaaggagaggttttccaaatgatttttaaagtattttatcaagaaaaattaactgaggttccagtacgtgaaaatacaaaagttttatatttagaggctacgtctgaaaaggatgttcgtacaaagttaaataagttcgcatataatatcgagtttgttcagtctgttactggcgctcatcttgaatatgaaaaagaaaacgctgatttaacattagcggaaatcgtatagcgatatgaaatttctaaaaaacgaccaagttgctgtatttgctctcggtgggcttggtgaaatcggtaaaaatacatacgctgttcaatttcaagatgaaattattataattgatgctggaattaaatttccagaggacgaacttctcgggatcgattatgtaataccagactacacttattttgtgcgaaacgaagataaaattaaagggttattcattacacatggtcacgaagatcatatcggcggaatcccttacctattacgtcaagtgaacattccgatttacggcggaaaattagcaattgcactcatcaaaaacaaattagaagaacacggcttacttcgtaaagcaaaactttacgagattcaagaagatgacgttattaaattcaaaaaaacgtctgtatccttcttccgtacaactcacagtattccagattcgtacggcgttgttgtgaaaacacctcaaggtcaagttgttcatacaggtgacttcaaatttgacttcacaccagttggtgaaccagctgatttaacaaaaatggctgaaatcggtaaagatggcgtactatgtctattatctgatagtacgaacagtgaagttccaaactttactatgtctgagcgtcgcgttggtgatagcattcaagacattttccgtaaagtagaaggacggattatattcgcaacctttgcatcaaatatccaccgcttacaacaagttgttgaagctgctgttgaaaacaaccgtaaagtagctgtgtttggtcgaagtatggaagcagcgattgaaattggacaaaaccttggttatattcgttgcccgaaagatacattcatagatgcatctcaactaaaccgcttaccagctaataaagttgttattttatgtacaggtagtcaaggtgaaccgatggcagcactttcacgtattgcaaatggtacacaccgccaaattcaaattattcctggagatacagttgttttctcttcttcaccaattccaggaaatacaattagcgtaagtcgtacaattaacatgttgtaccgcgctggcgctgatgtaattcacgggaaactttcaaatatccatacaagtggacacggtggacaagaagaacaaaagttaatgttacgtctaattaaaccgaagtacttcatgccaattcatggtgaatatcgtatgcagcgtatgcacatgaacatagcaaatgattgtggcatccctgaagaaaattgcttcattatggataatggcgatgttcttgctttacgttcggatgaagctagcgtagctggaaaaatcccatctggttcggtctacattgatggaaacggtattggagatattggcaatatcgtattacgcgatcgtcgtatcctttctgaagaaggacttgtaattgtagttgtaagcattgatatgaaagaatttaaagttgcagcaggacctgatatcatctcacgcggtttcgtttacatgcgtgaaagcagcgatttaatcaatgatgcacaaacattaattacaactcatttagaaaaagtaatggagcgtaaaacaacacaatggtctgaaattaaaaatgaaattacagacacattagccccattcctatatgagaaaacgaaacgtcgtccaatgattttaccaatcattatggaaatataagaaaaaggacaatgccatgaaggcattgtccttttcttttctcttatcttaaaaagtgtttaaatcgatccacttcatcgtcatgaccaatgacaattaatatatctcctgcttgaatattctccgtagctcgaggggatacgataacttctttgcctcgtttaattgctacaatattcaatccaaacttcgcacgaatatctaattcaattaaagagtgcccatcaatttttttattcgcaataatctctacaatactatgctcatctgaaagctcaaggtagtctagcacattgcttgatgcaatattattagcaatcctttttcccatatcacgttctggatgcacaatatgatctgcacctattttacttaacactttttcatgataatcattttgagcttttacagtaatattttttacacccaactctttcaaaatcaaagtcgttaaaatacttgaatttaaattatctccaatagcaacgactacgtgatcaaaatttcgaataccaaggctttttaataccatctcatctgttgaatctgcaattacagcatgcgaagctatatttgcaaattcattaattttatcctcatctgaatcgattgccattacttccatacctaattgagctagttctcggcaaatacttccaccaaagcgaccaagtccaatgacagcaaattctttttctttctcacccacaagaattcctccaataacttcaagtactatttattttcagtgtaacacactttatatgcgtcacaaaaactatgattagctcttatttttgtttttgtatataaaaatattgttgcaagtaaaaagcgataccaacaagtagcatagcaaatacaaatatatttccaaaagaactaaatgtttcaaaaacgaataataatgtttcttgaccaaaaaaggcaaatagaagctgtgtgaatgcaaataacaacgcccatatgtaatgatgttgatggaataaataatgcgttgcacctaaaaaagcaataaacgaaaagataaagatccaccaattttctaaaaatagttgccaattagaaaattgatatccatttactaatatcgcaataagcgcgataactgccatcgtcggcacactccaaaataatgcccgtcctctaaagaaacgagtgcctttaacatctcctttttcatgtgcaatatatgttagtactactgtgcttatatacaaaacagaaagaattgttaaaacgataataagccaaaaatgtaattgataatattcatgctctatatttgtcacgattgcagctaacatgcacggaattaacattcccgtccaaccatctacttttctttcatcccaaaagaccgtattaccaatccttattcctaacaacataaaaataatgatacccaatacaaataacgtagttttattccctactaaactcgttgagaaagcaattaatccaataaataaaaagagcacaaacccattcataatttctagtacaggtgataaatatctcttcacccatttgtatgtttcgtcatattcattattatctactagacgataggcataaaaacttatcccaaaataaaccgccgcaataataacatacgcatataagacgaaacataaaatcgcactgctaatttgcacgtaattccccacccttttttctatgtttcacattgattttacacacttttcatactaaaagtaaacatatataagttagtcaaataattaataatgagcagtggctaaaccccctgctcattattaaaacagtacaattaactttaattcttccatttgtatgtaaatgtctaaaatcaatctatacgagcgttacttacacctcagaacaaaaagttttttggaaccttcaagagagcggaagttttattttctattccctttccactttacatattggcttaaaaatgtgattgccttttcaatcacttcttcgtctggttttaattttgcatgatgtaaaccatattctgaatttactccaagccaaaacataaatccagggatttctcgaagcatataaccaaaatcttcacccgtcattgcctcagtacatgtaataacattcatatcagtttgtttatgtacaaattccataaactctctcgttaactcttcatggttatatacttgatgatacattgctccgtaatctataatcgcctcacactggaaagaagcttcgatacctgcaacaattgactcaattctgcttttcacacgcttcattgattccactgataatgttcgaatcgttccttctaaacgagatttttctgcaataatattttgaaccgtaccacctgtaattttcccgattgtaattactgcactatcaagtggattcacattgcgactaataacggattgaagctgtgtaacaaggtggctcgctgcaacaatcatgtcatttgcagtatgcggataggcagcatggccacctttcccttttaaatcaatatataattctgaagtattggcaaataacagtccttctttcgttgcaattgtccccacagcgtattctggtgcaatatgaagaccaagaattatatttggtttccattcttttaactcttcactttctaacataggaagagcaccgcctggtccttcttctgctggctggaatagaaatacaaggtcatcatctattctttcgctcacagctttcgttagaaggcctaaaccgattgttgtatgtacatcatggccacatgcatgcatcattccttcatgaatagaagcaaactcgtatccagtttcctctgtaattggtaaaccgtctatatctgcacgataacctattattttttcgggattttttccatttactttaacgattacacccgttttccatgtcttcacttccacaaattcatgagaaagtgttcctatataatctaaaatatactgttgtgttttccattccttaaatccgatttctggaattctatgtaaatctctacgaatttggataaatttgcttactgtcatttttgcacctctatctataaaaagcgtaagagcccatttacgctcttacgctttttttactttttatttctctgggtttaattgacgaagctcttgtttaatttctgtttttgcttttgtcttctcatcaatttctttaattacacgtgctggagtacctgcaacaactgtgtatggaggcacatcttctgttacaacagctcctgctgctacgactgcacctttccctactgtaacaccctctaaaacaaccacgtttgcaccgattactacatcatcttcaacgataactggttttgcagaaggtggctcaataacacctgcaagtacagcacctgcacctacgtgacagtttttaccgactgttgcacgtccaccaagtactgcgttcatgtcgatcatagaaccttcaccaattacagcaccaatgttaattgttgcattcatcataattacagcgttgtcaccaatttcaacatggtcacgaataatagcacctggctcgatgcgagctttaataccttttaaatcaagcatcgggattgcagaattacgacgatcgttttctacaacgtagtcaacgatgtgcttattattctcatcaagaattgtcttaatttcagaccattctccgaataatacacctgactttttattcacaaatgcttgtactgtttcagggaatgttacttcttttaaatccccttttatgtatacctttacaggagttttcttttcacttttttgaataaacgaaataatttcgttagcgtccatcattttcattcttgttgcctcctaaatccatttataatgttactctaccaaacgaaagagcgagtagcaagataataatcttatttttccctttgaatttcttctataatttctaaaaatgcttgtacttgcttcaactgccttgccgagtcacttgttaacaaccatgtttctctcgtcagttgaacaggtgttttatacatattttcctgtacttcctttaaaacagtagaaggtaaaagggcataacctataccatttaaaacaagttgtttacatgtttcaatttggtcaactacaatcgttcgcttaggcggattagaaaataaaccataccaccaattttgtatttgtccataataagtcgaatcacttttaaattgaatgaacggcctatttgtttcttttaacatcgaaatatcttttatttctttatcaactaaatacagttcatcttcaaataattgttgcttctgacctttatattcttgtgttcccctcagtatagcaacatgaacgtctccttcataaaactgcttttgcacttcactactccatccagtaaacagcgatatcttgacagaaggatatttatgcacaaactttttcaaaacaggagggagccaatattgaccaataactgatgcaacagctatttttaacgttccatgagtttccgttctgaaaacagctagctcactttttatatcttcttccctttgcaacatttctttagcataatttgcaactttttccccttcaggtgtaattgtcaatcctttttgtgagcgaataaaaaacttcattccccattgtttctccatagattgtaatcgttgactcagcgcaggttgggaaacaaataaacgttccgccgcttttctcatatttgattcctgagctaacacaaccatcatttgaaaatcatcaatttgcaactttctccctctttccttagcttccatacaccttatttcaataagcttttcatccttaatttacccgaatgctttcattcagaaaatacaattgtccagcgcaaactttccttatgttttatgtctttttaaatataatacatacacaagtgatatgcacgaaaaaaaaagtgacttcttcgtttctatgaagtcacttttcttacgttatcgattatgttgccttactttcttattcaacaattttaaaatagcccgacgtgttaaaatcccctcaaaatagccttcttcattaacagcgcaaataaaaggatgatcaattgtcatttctaaagcttttgcaaatgaatcgtctaatttaagaacaggtatatcttctttcatcacctgctctactttcatatcatcgagtctttcaaactcaatacgttctaatcctaacataccatctaatatcatggcagtactaatcaaaccatgtagtttatacattggatctaagacaggtatcgccgaatatccagatttcacaagaacgagtaaagcatgttctaaactatttccaatttggacatgagctactttttccgatgaaatcattaaatccttcacaagaatttgttgaaattcgtctttcggaatactaatcatattacatcccccattttccctttttcctgcttatgttcacaactctattcacattttatgacagcgttttcatattattattttgtcctaaatttatttcaataaaaatacaatcacacagctattttagcatacagcacaaaaaaaagactaccattccggtagcgcttaataccctttattttttaatctgtaaaataaccttgtgatttttttatattgcatcacatctgtctgtttcaaaccattctcaatatctgtaagttccacagctaaaatttcacttgcgtaattttgctgaaataaaatatctagtagtaaactttcttcttccttcgttaaaacaacttccctttgcatatacccctctccttacactcgcatcgttactcttattatataaaaaattcaacctatttaatagatgtaatattcagtttttattaaaagatatgtagcaatcgtatacatacaaaaaaaatcatttcgtatatcgatttgcatagctaaacgccgcataagcatctggcttaatttttgcagttaatcccatcgctcgaattttttctgtcatatctaaaataaattcttttgttaaaccatcattcccaatgtctaaatgaatttccattatgaatccagccccatcttgagcataaggatgcaataactcccatattgtttgtatatgagtaggcgtaaatagacatgcgatttcttgactaaactgcgtttctaaatatattttctcacgtaaggttgccggcttatcttttactgatctatggtgtaaacagccccaggcaccttttccaacacgatgaatatggattgctgtaataaacctcgtatccttttgatgcgcttgtgagtctgtcccaatggataatcgatataaatttcgcggatccttttcaatgaaactacaaatacggttaaagaccatatcaaaatttaaatgtctctctgaaacattgtaaaatttatgtgcaccgtccacagagtcacgtcctttcaattagacagacttttcgtattctcattgtatgggacaaaaactaaaattataacttcctatcctttattcgtttcaatatttcgaattacaaagtgacaaacttggcacgtataaattacattttgattagattgagccgttaatacatgaataatctcagcagaactttgacaattaggacaaatcacaactggtaaacgttccatacgataacctcctagttatatttctcccgctatttgcagaacccagcgattgtgagaagtttagcttcacatattcacccggttgacgggactcattttccacatggataagcaaacttgcacggattaaaatttcattttaataccattgtaggaaaaataaaaaacttctatacattccactagaaagtaatagaactaaaaaaggtactgccacatggcagtaccttttttatatgtatcaagaaatgatatcgtaaatctcaattgcaaccatgtcgatattatcgaattgatacacttgaggtttttcaccttgttgatacacttctaactcatacatttcacttttatcgaaaaatttcacgctacatttgcgctcaccgttcacttcaaaatagcgttgtgctacttcaccgctttcagcttgttcttgtagactaacaagtcgagttaaaattccttggagtagagacatgaaatctctcctttctctgatcttcctaccaataggttttacagctatactcattctatccgtcataacagaaaaaatgttccacactctaggataaaggttattggccagaaactcaactaaaaatttgtcgaaatgcgaaggaaaaaacagaaagaacatatttccccttctttattgcggtttttatactggaagaatataataaaaaacagaaaaaaggaggaataacaatgaaaaaaattgaggtttatacacaacccgattgtccgccctgtgttattgtgaaagaatttttgaagcataataacgttgcatatgaagaatttgacgtaaaaaaagacgctgctgctcgcaatcgtcttttatacgactatgattcttattcaactccaacagtcgtaattgatggcgaagtagttgcagggtttcaaattgaaaagttacaacaactactcaatatagaataggaataggtaaatacctattcctattcttatcccgctatttgtgggtagtaaaactcctaccccaaatttagctacagcaaagaagttagatggaagagtaatccctcccactgattaaaagtttcactttataattgttgcaacctttttatttcagttaaaagttcctgactttcatgatatcctgctagcttccatttatcttgatcccttttcaatgttacaatttgatactgtccactttttgtccgctcatatacatataaatttttatgttcttcatcatacgacattttcgtttctgaattaaaagaaaacggtgcttcttttgccggaagtaaatattcaccactttgtttatcacttctgctattttcatctgtaaatacttgaaggaaattatctgtaaaatacggtgataacgtctctatcatcttattcatcggcaaatgcttcccacgaattgaaaactgggtttcatagcctttttgtatcgttgtaaatacttctttccgatcgacttccacttcctcttttcctaaaacagtcgtaacactataaccaactagaaaggcaacacatacaaatagaacaagccatattccatatttcctcattttttcaccttccttttaaaagaacttgtctttgtagtattcattgtaacaatgattatgcaaagacaggacagatttcgttcgtaaaatctttacaacgatagacagcattttcatcaccattttcactattaccaatttatgataaaaacaaacaaaaaatgcacgaatctcttcgtgcattaaaataaaacatcttcttcatataaatattcataagataaatctataaataaaaagttgtcatcatcaatcgggaaagaaaatgttcgtaccatttctcccgtttcaatatctgcatataaatctgaaagcctcgccttattctcaaaacgcattttcatgatattctcgagaaaatacgggcgccaactccagttcttcatataataatccggcatcacaatccattctccatcttttttcataacatttcctgattgttggaaaccatcttcattacaaataaatatacgaaaactacactgtgatacactttgactaaattgtaataaccaatcatttatatcttcattctttttttgttttgataaaacatcgccaatgcgatcgcgtaacatctctgttaaattataaattttttgtaacttcttcttttcatgctgaataaactgatgacattcattacctagtcgctctttcaaaacattcgtttcaataaaatcaggtaaacattctttcaaataattaccttgataatatcttccgccgttcttccaagcatattgcagttgataaaaagcatctatttcttcatataacaaagttgcaccaattcttctagcaagtaatgataaagaatataaaatatcttgataagattgtaaaagtgctgtttgccttaagttcgttaaatctacttttaaaatatcaggtgctaacacgctaatacgctctaaattacttgtgcccgttccgactttattaatcgaaatttgaataccatatgtacgataatacataagcaaatgattaaattgctctatatcttctttacattcatgctctgtaatctctaaaacaatttgttttaaatttaaaccttgttcttcatacctcaataaaagttgaagcaagctttcatcatcatcattcattaatacattagcattccgatgtataaataataataatttttgatcgctttctaaataacgatttaaagctttttctactataatattatccgcttccagttgaaattcacttggaatcgaatcatcgtgaaagaaagaagctaaactttgtatgccctcttctgtttgaatacgtcctactacttcgtatccaattacagtatgctcatcagcactaaaaatagcttgataataaggaaggactttatccaagttactcattacatctaatgcatctatcaacgtgcttccctccctttacttttcaaaaattataacatgatatttacggaaaaataataaaaaatcccttcagttttcctgaagggattagaggggtaaaatgctaaggggaattagcaattctactatgaagaaaaaagaggtcttaaatataacgtatatatgacctcttgtaaacacttttctttcatatgtcacaattccgtcacatttaaccataaaaaaatgaatcaaacattcattttttatcccttttaaaatggatattgatgtaaatgttgtcctccatccattgtcatgcaagttccatttatgtacgcagcttcatctgaacataaataataagctagaccagcgatttcttctggcgtacccagccttccaagcggaacactttgtatcgtccgtttagccatttcttctgaaatccataatttatcagcaccgcccgtacgttcaattggtcctggcgcgatagcgttaactcgtattccatatttacgtccccactcaacagcgagcgtcttcgtcatcgctaatactcctgccttcgctgcagccgaatgaataactcctggaccagcatcccatgcatatgttgctaccatgttaatgatattcccttttatacctttttcaatccaatattttccgacagcatggctacagtaaaatgtaccgtttaatacaatattaatgactgaattccagccattcacagataaatcttctgctggacaaataaagtttccagctgcattatttattaaaacatcaattctaccaaacttctcatcaatctgttcaatcattttctgaatgtcatccgtatttcttacatccatttgtacaggtaatacttgccctggaaattgttcaatttccaactttgtttcctctagtttttcctttgtacgtcctgtaataacaactcgtgccccttcttttgcaaaacgagtcgccattccttttcccattccactcgatccacctgttataataactaccttttctttcacatacatcccctccaaaaaatgaatacacattcattttatcactttatttaatagaaatctttatatttttaaacttttctgatattttaacgtaaagaactttctttttattcatttttttcgtaatctatactactttttattatgtaaagtatattttaaataaactgaaaggagatttgagtagcctataaatggaatgaaaacattgaggtatactcatatttttatgaagcacattacaagaagaaattttttaaaaattggtatgcgcacttgtctctattcatttataaccagtagcatcggatactactatgctaaatatatagagccccatttcatttcttttacacagcacacattaaaatcacaactcatcccaaaaagttttcatggtatgaaaattcttcaattcagcgatttacatctcggatactatttctcgcttcaacatttatctaaagttgtttctaaaattaatgctgtaaatccagatattgtcctttttaccggagatctcattgataattatcaaacgtatactgacactcctttcgttgcatccattttaaaaaatatacaagccccctttggtaaattcgctatttatggtaaccatgatcacggtggatatggaactgaatactatgagcacatcatgcgtgaatcaggatttgagctattgctcaatagtgaaaaaagaattcgtctaatggataatagtgaaatttctattttcggtctcgatgatatactattaggcaaaccaaaaatagagaaaacattagagcatgcacggcaaagtacttataacattgttcttgttcacgaaccagatatcgcgccccaagtttctaaatatccaatcaacttgcaactttctggtcatagtcacggcggacaagtacaaattccttttttaggagctattattacaccttcactcgccaaagactatattgaaggcttctatacaattcaggatttaactctctatgtcaatcgaggcctgggaagaacacgtgtcccatttcgctttatgtcaaaacctgaaatcacaattttcacactccaacattcgtaataattcgcctattttcttacatatcctttcttgtacgcgctcatccacgttttgtttaccatatgataaaagtgagtccaataaaggaggtatgttcatgtatccatattatcaaccaattccagtccgttcagcacctattggtccagtaggcgactcacgcttcttcccgttttttggcgttccctttctagctggaattgctggtggattgctcggcggagcattagctttcggccctcgaccattttatccaccttatccaccacctttcccgccgccagcaccttatccttgttacggtggaccatgtcagcaaccatactattactaagttaaaataacgattctttcaaatattattctctcaacgagccatctcattacacgcttataataaaactattgtttctactcattcttccatttttggagcatatgagtagaaaaaagtaaaaacctcttattgacataagaggtttttacttttttcattattcagcgtctgtattttgatatgccatcttaaacaacttcacttggctatcaatttcttctgtactactattaataacataatagtaatcaccatctttattttgttcacgtgttttcacattatcagctaatgtaagctgtaaaatcgccttaattcgtgccttcatttcaatatctaatatcgggaaagatatttccactcgcttctccatatttcgcgtcatcaaatcagctgaagataaatatattttctcctccccattatgatggaaataataaatacggctatgctctaagtatcttccaacaacactaactacacgaatattttcacttacatttggaatgccaggtcttaaacaacatgtccctcgaacaataagctctacctttactccagcttgtgatgcttcgtacatttttttaattaatggtttatctgttaatgaattcatcttagcgataatatatccatttccatattgcctatgataacggatttcttcatctattaaatctataaattgctctcttatatcaaatggagcaaccgataaatgatgaaaatgtggctttgttgtataaccacttaaataattaaagaaattggttgcatcaaccccaaagtcttttcttgatgtaatatatccaaaatcagtatataacttcgctgttgcatcattatagtttccagttccgagatgtacgaacctttcgatttttccgttttttcttcttacaactaatgtaattttactatgtgttttcaagtgacttacaccgtaaataacatgacagcctgcctgttccaattctttagcccaatgaacattgttttcttcatcaaatcttgcctttaattcaactaatactgtcacttgttttcccttttcagccgctatctttaacgcctgaataatcggtgaatcaccacttacacgatataacgtttgtttaatcgcaagtacattcggatcgtccgccgcatcacggacaaaatcaactaccggctgaaatgattcaaaaggatgatgtaataaaatatcatgctcaattgctttttcaaatacatcttcttcatcacctaaatcttgaggtggttgcggaataagagccggatatacaagatgttcatataaaggagctagttttttatataaagaaaacaaacatgttaaatctaatggaccatccattatatatacatcttcatcttttacttccagaacctcatataataacgctagtactctttcatcaatgtgttctttcccaacttctaaacgaacagcagccccccacttacgcttttttaattctttttcaattacctttaataaatctctcgcaccttcttcatgaatcgttaaatctgcattgcgtgtaatacggaaacgagtaacagatgatactgtatatcccgtaaataatttatgagtaaagctactaattacgtcttctaataaaataaatttatgcttttgcccttcgctcggtaaaattatgaagcgctcaagtaatgaaggaacttgcacaattcctaacttcgtcctgttttcctcttccgcttgcttctcatcatataaaagagtagccaaattcaaacttttgtttaataacattggaaatgggcgatatgcatctatagctacaggagttaacaccggaaaaatttgctcatcaaaatactcttctataaattctcgctgctctttcgtcaaatcattgaatgttaaacgttcaattccctctaactcaagcgctggtaatacataatttttaaatgtatcatattgtactgtcattagtgcatgggctttcatcgcaattttatttaattgcttttttggtgttaagccagctttattttctggctgattaaatccagcactcacttgatcctttaatcccgctacacgtaccataaaaaattcatctaaattcgaactaaaaatactaataaatttcaatctttccaaaagtggattatttgcatcttgcgcttcttgtaagacacgttcattaaatgctaaccaacttaactctcgattattgtaataagctgtatcatttaaatttactgcattccccttcaataattccattctcttcacacttccccttgaaacttttttactataatttagttacttttattttagcaaattacaatattataaagtgtaaattttttgtaaagacatccgtacaacctaatgttttagttcaaataacaagttaatattcgtttttaatactctttctaactgttttttttgtttttcagcctgcactttttccgctaatgccgatttttcacataaagctttaaatgttaatccttcttcgttttctgttatagatatggtatcaataagcgatcgttgccttacatttaaagtagctgaaaattgtaaaacagctcctaacaggcgtatttttttttgttcgcttttatcaaaccaaccttcaaatggagataaatgttgtttaaataacatttttgatttatacgatgcaataagcgctagccttactcgatctttatgcatcatgccatcaattgtcttattcgctaataaataaaacgtatgtaaacggcttgcttcttcgtctatatatttgcctatattaaatactttcgctgcttgatggaacacttcccagtcttttactgacatagaaataagccctatttcctcaagttgtttgcaaattagtcttccatgtttaataagctgaataacaaattccatgtccatttcgtattcatgtgatagtaaatgcagactttcttcaactacgttcggataatatgaaatccccaaatcttttgtcaactcttcatagaaaacaccttctcttaacccttttctacttaatacaaatgccggtgcctctataacattaacaagtgtatgaaatacttcaaccgctggaataatcgtatctgctcgatcttttgccaatccttccaatttctgaagttctatgaacgacaatttttccaattcatcttttacactttcaatatcttcttctttcatcttgtataaatgtaatcctgctataggataacatattaaattttgatggattttcactaagttcctagcactaccaccaattgcaataagaggtaatttcttattgattaaccatggtaacgttcgaaattgaaactctaaatactgttgcattccctctaactcatctttagtaggaatatcccctttaataaattgttgctttaaagaaagtgccccaaatggaaaactatggtactctaaaatctctctatttctaaagtatgtaacttctgtacttcccccgccgatatctaccgttattccttctgaaaacgatgtagaattcataaccgccaagtatccgtaacgcgcttcctcatactctgataatactctaagagtaaagtccgtttgtccttcaacaagctttttaatttcctcttgattctccgactgtctaattgttgctgttgcaacacaaagtacatgatgcaactgatggaatcttgtactttcttgaaattgaaataatgtctgtaataatacttctattccctcttcattcaacacaccatcaattaagtaattccttaacctagcaacaactttcgtattttcaatctctttataaaaacctccattttgcttttcataaataactaaacgcattgtattagatccaatatctataatggcatactgttgttttaatatttctttcaaacttctcactctttcattatcaaatttaaaaaacatattctattactattatacaaaatagttgttttttgtaacaatattgctttaatattgaaaatatatacaatcactttttgcgtataataaatacctattttatttatggtataataatgaaaaattgaaaggagattcaatatgaaaccttcacaaccacaatctcaattacaaaaccaacattctattaatcgactagctcaatctattttcgttgtgaatcgtcatgctaaagcagctactaatcctaaatatttatactggttaaaaaagacagctttagaacgtttgattgctgaaaaaaaagcaattaaagaaggattacatttttctagaaacccacgttttagccaacaacaatctgatgtccttatacgtttaggcgattattttttccacatccctcctacgaaagaagattttcgaattctaccgcatcttggtcatcttgaatcctcctatcgaaatccgaaaacaaccttatctttaacagtggcaaaaaaaacaattcaagattatattggtcctgaagcattaaaacaagaaaaaaaattaagtgaacctgttccatggtatagtcgtacttatacaaaaaaataaaacagtttggccaagtgtaggccaaactgttttattttttctcttctttaattttaatatttgcttgtttataaaaagctactttttctgtattataagactttgtgaattcattaaatttatctttttctgactcaatatccttataagattgatttactacttttactttttcactaatatcttttaatttagtacctttatcttgtaacattgtatataactctttttcttgttttaaagatttgtcatagctgtcatacattttattaaatgaatcgtgtcgtttctcatacgtgcttttcactttatcagcttgatctttcaatttcttatcttcaattttcttcacatacttatcagctgacttcacttcttcttgcgctttatttaaaacttctttttcttttgcaagcactttttctcgttcagttgtatttttcactgcttgattcagtttttctttaacagtttgattattatcttttccttcttgaacaatctggttatataattcttgtccttctttctctaaagtctcaagtttttttgcatcttcaaacattgttttttcttgtttagcagcgttttcaaacgctacatataattcttcttctggtttcggaccgaaacaaccggctaataaaatcattgataatgcagttacaattgctaatttactatatttcaacatctcttcctcctacttataaacgaccatcgtgtaatataaaaaagttataaaatatgtaattgttctatacactcgcatcttttttacgaagatcattaatattgtttgtacaaattattacttgatattacattattctttttgaattatttagcaattccatatccatctttaagtatactacttcgtgttttttaaggcctgttcacactatgtattactttaatgtccacggaatttcacctcagtcttaataagactataatagttcacctgataaaaggtgatcgctccgctctcacgtctatcattccctttccagctttctatcaattaatctctttgttcattttacacagtacaatcgatatctcgcaacaacttacaaatattcttttcatttcctaaaaaggaaaagtgtagagcttgctttcctctacacttttaaaataaaacacactgtgcaaattgcattgacactaccatcataattatatgcttatttcatatatttttaaagacttttattacaaacgtggcgtttttttgtaataaaagtcaaaaaaatgttacaaataaaacatcttcctatcatatatcttcaaatcaaagcttcactcattttcttgcaaatttctatactggtacaattgattttgcgactttctcaacagttcttcaaacgtttttccttctactggatagctagctgctccaaataaaagagtgacactgagtaaatcaccttctatttcactttcaatatttttcattaatcgttttgttattgttgatgtttcatggccattatcaattgctacaataacgtacttattttcatcccactttgtaacaacatcgcccttccgaattgtttttacaatggtactctctaatttttgtactaacactcccaactttttttcttgcaacgtgtcttttaatccttcccattcttttacagaaagaatgtacactgtaatattacgagaatctctttcagataaagcagctactttcccaaaaaaatcaacaacaaaatcattgcttgccattcctcctacttccatacccatacgctcgttcgctcttttatcgtaccaatgtccaaaataataacttagtatcatttgcaatatataaataataaagacggtataaaatgatcgtgaatccagttttgcaattacatcctgaagtgcaatccattctgtaactgccacagtattgccaagcaataatccactaattttccctttatgtttcatacttttcccccttttataccaatatatgtttctatatcaataatgtttttctacaaaataaaaaatgtacatatgcaatgtacatttctgcttaagcttgtataccttttctactctatttcatatatataatatataacttttatagaaaggagtaatctatatgctacaaaaagagaatctatcagatgctatgcgtttactagctggttttctattatcattaaaattattatttacctctttcgggatacactttattacaaacgatcaaatcgacgctattgttaatgttgtttcatttttatttattctatactttggctacaaaaataactatgtaggaaaaaaaggaatggagcaaaagaaaatactcaaaaaacacaaccttcactaaaaaaggaaccttttgtacaggttcctttttatcattgacgcacaacaacttcatttgtttgcagtgggccatatgatatctctttatcttgaaatgtatatgtagcctgaaagaatgtttgtttaagagctttatctttattagcttttattttacaacgtagttccaccttctcattcggtaacaaatcatcaattcgccatctaacaagctggaataaaaactcacttatccccttatcaacttttaaagaattaggaatataagcaaagtaatctcgaatcatatgacttacaacaactctcgaaatcatttctacccctttattttccacttcaattcgcataataagtatgtcgtttacatcgtaggtcaattcatacgaaaactgttctgtatacatactaccaatttgtaatgtaacggctacttgaggaaattcgttttcctttttcgatccgtcaatccacaatactggttgtagcggtattgaatactttcctgtatccgaaattcgtccccatattttcataatatatattcacctcatttcagatgtaacatacacacaatgaattccccaaatcactaaagcttgctacaagcaatgtttaatatttctcttccttttatcctattcgacaatatgaagaaaaaaccatttttcatctattaacagaaggtgttctttatgaaatttttttacaatttacttcatttcctttatagcaatattcagtatggctcactcgttctctactcatacgaaagaatattttgacggaagaaaaagtttgccttatagtcaaatttgactataatattctttatggcatatcagtgcacttatggaaaaggaattaaaatcaactatacatttaaaattttttatccactgcactcaaaacttaatatagtttacttatttctaaaggagggttatatttggaaactcaaccattaaaaaaagacgccaacaaaacaaaatttgttgttgctggtttactgcttggtatattaatggccgcaatggataatacaatcgttgcaaccgcaatggcaacaatcgttggagacctaggaggatttgataagtttgtttgggtcacatcagcttatatggtagcaacaatggcagggatgcctatcttcgggaaactttctgatatgtacggacggaaacgtttttatataggtggcctcattcttttcttattcggttctgcgctctgcggaacagcttcaagtattgagcaattaagtatttatagagctattcaaggtatcggtggtggtgcccttatgcctatcgccttcacaattatgtacgatatcttcccaccagaaaaacgcggaaagatgacaggactattcggtgctgttttcgggacatctagtgtattcggtcctttattaggtgcttatattacagactatataagttggcattgggtcttctatattaatattccattaggacttatctcctttttcttcattactaaatactacagtgagtctctagaatttagaaaacaaaaaattgattgggctggtgctattacacttgtcataagtatcgtttgcttaatgttcgcattagaacttggtggtaaagaatatgcctggaattctactgtaattattggcttatttacaacagtagttattacgcttattattttcttctttgtagaacgaaaagcaaccgagcctattatttcgttccatctatttaaaaaacctttattcgcagctagtcaaggagttgcctttttctatggtgccgcttttattatctgtacagtttatattccaatcttcattcaaggcgttcttggaggttccgcctctaatgctggattaattttaacaccaatgatggttggttctgtaattggaagtcaaaccggaggacaattagcgtctcgaacaagctatcgtaacattatgatggtatctggtttcttcttcgttcttggtatttatttattaagtactttaacaatggacacacctcgtttactcgtaacactatttatgattctcgctgggcttggtgttggtttctcattctcagtattaagtatgtcttctattcacaagttggaaatgcgggaccgtggttcggcgacatcaacaaactcattcttccgatcactcggtatgactcttggtgtaacgattttcggtacaattcaaaatcatatttttacagataaactaaactctgtatttccccctgaactagcaaaattagctccaaaaggcggagacacaagtttcttattatcaccaggcgctaccgcaaaaattcctgctgaaatattagcgggtattaaagaagctctcgctacatctattgcgaatacattcttctgggcactcatcccggctgtactaagtattatttgtattttacttatgggaaatgaacgcctctttacaggccctaaaaagaaagaaaaacaaaagcaagttagttaatataaaaaagaagcggcatattcctttatgaaaaaggatatgccgtttataatatgtataaagtgaaactttaatcagtggggggggtgttcatcccccactgattattagccctcaccaatcgggcttttacgggcagttaatccccacctaacttctttgcttccgctgaatttttgggtggggatcttactggataaagtttttatatacaggagttgagacagcatgagcatgaaattagtcattctcggcttgctactcgaaggagataaacatccatatgaagtgcagcatattatgaaagaacgacaaatggattgttatattaaatatgctaaaggatcactttattacgccttcgagcaattagaaaagcaaggcgcaattcatattacaaatgtaattagagacacaaatcgacctgacaaaacgatttttcatataacagaagaaggcaaaaaactattccacactttactattaaaacaattcgaagccaaaaaccaaatatataaacctatttattcggccttatctttcgctcactttagcaatgatcacgaattagttcctattttagaaaaaaagaaaaacgatactcttcaatatttacatactatgcaaacgatatatgattgtaataaaggaaaggttccacgtgcacaactatatattttgcaaagtgtaattgagcatattacagttgagttacaatggctaaacaccctccttaaagatgctatagcaggccgactttcagaagttgctatagatgaaaattgagctatgaaagaaggcatccctacttctttcatagctcaatttctctttttatactgtaatattattagttaatccaggatgaaaagtcataataataagaaataaaaacttttgaattttcttatttcaaaacagtagacaaaattccaaaaattgtgttagaatttgtttcaatatcatatcgcttgttaaattcctttcaaaaggaaaataggtacacgaaagtttcgtttcgtgtttaaaagggaagcttggtgaaactccaacacggtcccgccactgtaaatgctgagatttctttttggtgccactgtgaaaacgggaaggtgaaagaaattatatgaagcataagtcaggagacctgcctgttttaacaacactgatagattcacggatgatgatgaggtgttaaaacaaaaaggaaggcttattttctatgtctttgtactttttgttataggtatttcctagtaaacggaaatgcttactttcaattagggaggaatttaaaatggcaattcaaacaagtaacttaggttatccacgtatcggactacaacgagagtggaaaaaaacattggaagctttttggtccaataaaatcgatgaagaacaatttttaacaacaatgaaagaaattcgccttcaacacgtaaaagtacagcaagaaaaagggattgaactcattccaattggcgactttacatattatgatcacgttttggatactgcctatatgctaggatttattccatcacgtttttctgagtttacatcttaccttgatgtatatttcgcaatggcgcgtggctctaaagatcacgtagcttccgaaatgacaaaatggtttaacacaaactatcactatatcgttcctgaatatgaagagggattacaaatctctttaaaagataatcgcccacttcgcttatacgaagaggcaaaacaagaattaggagtagatggaaagcctgttattttaggaccatatactttcttaaaattagctaaaggctatacacaagaacaatttcctaacattttaaaacagttagttgcaccttatgtacaactgctttcagaactacatgcagctggggcacaagccattcaagttgatgaaccgattttcgcttctttaactaaaaaagaagttcaacaagcaaaagaaatttatgaagctattcgtaaagaagttccaaatgcgactcttcttttacaaacatattttgatagcgtagaagaaaactatgaagaaattattacattcccggtatccggtattggattagatttcattcatggtaaagaaggtaatctaaatgctatttcaaaatatggattcccagctgataaaactttagctgtcggttgtatagatggccgtaacatttggagagctgaccttgatgaagttcttgagttatttacaacgttacaaaaacaagtccaaacgaaagatatcatcgttcagccttcttgtagcttattgcatacaccaatcgataaaacagaagaaactcacttatcgactgagctgtttgatgcgttagcatttgcaaatcaaaaattagaagagttagttcttattcattccgctctcactcaaggtacagaaagcattagtaatgagctggaaacatatcgaaacgtacatcatacaattcgttcatctgctgcacgtaaccgagaagatgtcaaagcagcacgaacagcactaaaagaagaagatttttcacgttctcttccatttgaaaaacgatacgaattacaacaagttgctctagagttaccgctattaccaacaacgactattggtagcttcccgcaaacaactgaagttcgtcaaacgcgaaaagaatggcgtaacggtgttatttcaaatgaccaatatgaacaatttattgaaaaagagacagaaaaatggattcgttaccaagaagaaattgggcttgatgtacttgtacatggtgaatttgaaagaactgacatggtcgaatattttggtgagcgccttgctggtttctcattcactaaaaacggttgggtacaatcatacggttcccgctgcgtaaaaccacctgttatttatggtgatgtagcctttattaacggcatgactattaaggaaacagtttatgcacaaagcttaacagagaaagttgtaaaaggaatgttaaccggacctgttacaattttaaattggtctttcgttcgaaatgatattccaagaaaagaagtttcgtatcaaattgcactagctcttcgtcacgaaattgaactacttgaatcttctggaattagagtaatccaagtcgatgagcccgcacttcgtgaaggaatgccactaaaagaaaaagattgggatgcttatattacatgggcagtacaatccttccttttagcaacttcttctgtagcaaatgaaacacaaattcatactcatatgtgttacagtaacttcgaagatattgttgacgcgattcgcgcattagatgcagatgtaatttctatcgaaacatcaagaagtcacggagaatttattgatacattaaaacatacaacatatgaaaaaggcattggcctaggtgtatatgatattcatagcccacgtgtaccgagtaaagatgaaatgtataaaatcgtagaacaatctttagaagtatgtgatcctaaatatttctggattaatcccgattgtggtttaaaaacgagaagaacagaagaagttattccagctttagaacatatggtgcaagcagcgaaagatgctcgttcccttttaaaaacaaacgcataacaaaaatgggttatccttttctcaggataacccattttttattctttactttcaaaaaagaattcatattgtattttatataattcatcatccgttggctcttcaagaggaattgcttgtaatacaactgtatactcaccatttggaataggtatttgaaatttattagaaagaatactcgttataacgatactttcattttcaactgtaaaaggaaccgtaatcgttctaactacttcttctttttcaatatgtttccctggggtcactttcacttcacaagtataatcagaaagtgcttcaaaaataacagttccatctgccttagcataacctctttcaaaatcttcatcagtccaatctacataaggctgctcaccgtcatagttcatcaacattaattgcgaataagaaatcgttaactccatagttccccttctccttcattatgaaatatacaactactacttcacttcaaattttactcgcgtaccatctgggtatttatctaacttattccctacccaagagcctgctccacggttatccgccggacttatatattcaatatgtgctccttttccgccttccttgcacatcgccattggccattcatcacgatcataccctttttttgatggatatggtgctaacgacaatttccttctatctgcagcaccaccacgatcgattgtacaaacttctgaatgcccttcttttatagcatccgtaatatgttttcctgtctctggataacgttctttcggaaattctaacacttgatcatacgtattcgttttctttacacttgtttcctctggcacaagtacttcataaactgctactaaaatagacagaattgcgataattgaaatgataataccttttaattgcttcatgtatacctccatgtttctaccagtttcttttcctccgttattataacaaacttctcctgtatatgttttcagacattattttagttattccttgccattccgccaaaaattttcattttttcactaatgctgtagaaaactaatagccttccgacattctttttcaaaggaagtcctcataaaagattgaaatgatatatacgatactttttggggaggaaatatgatggaagctacctataaaacgaaagatgtcacgaataaaacaggcatcccaaaacatatagttcgcaaatatagtcaactgttagaggaacatggttatatgatttccaaaacagctgatgctcgtatttataaacttgatgatttaaaattattgaaatctatacacgaaagagctgctacattacaagaagatatttcagaaacgataccgattattttaaaagaaaaagaggccccacctgtaccagttatacaagataagcaagagatacaaacgaaagaaaaagaagatgggcgtaactttgaggagttcatgttaaaacttgaaatgctagctcaattaaatgaggcaattattcatcaaaattctactctaattacacaaaatcgtttaaaggatgagaaactagacgaattgatgcaacaagtttatgtaaaagaaggctctcaagaaaaaatgcttcaagagttagtcgatcacgccgttcaaacagatgcattgcaaaaagaaaagatggacttattaatgaatcatatgtataaacgagaatccaaacaggaagaaaaaatgaataaacttgttagtcaaatttataacaaagacagtaaccgtgatgcacagcttatgcaagttattcgagaaattcaagaaacaaaaagaatggttgctgcctcaaaagagcaaagcttctttcaatcatttaaaagtttatttagccgagaaaaacaagaaaaaacaaatgaataaacaatataaaataaaaagttaccttccatcggtaacttttattccttattttgtacagctggtaatataataattgcttcagttccttttccactttcactcttatattccaatgtaccattatgcgcttgtaaaatactaaatgttaccataagtcctaatcctgtccctttttcttttaaagaataatatggttgcccaagccttgctaactgttctttcgtcataccaacaccactatctttaactcttattatgattgtttcatctttttgaatagctgttacttttaaatatcctttatttccttgaattgcttcaataccatttttaacaacattcataatagcttgcttcaattttgtcttatcaccaatcgtataaagactttctgaaatttcaacttgtaaatatacaccttgcatcgctgcaaatgacgacataagagtggtcatttctattaattgggctgataaacaaatgtgttcttttttctcaatttgcggccttgctaaatttaagtaatctgaaataatttgttccgcccgatccaattcagctaatacaagacgcatataatccttattcttcacatcttccgtactttctagcaattggataaatccacgaacaacagttagtggatttcgaacttcatgtgccacacttgctgctaactcacttacaatattaagcttttctgatttttgcatctctgtacgtagcaatgcattttcatttaaatattcagttaaatacacctgaaataccattgtcatgaccatgataagcgaggcaaatataaatccgctatatatttgcgaaatatacggtgtaaatcctgtttccaaaagaacattaatcatgcctaatactaaagaaacaagcacataaaatgatgaaatcataaatgctaaaattaatttcttatcccttgaaaaaagagaccatttctttgataaaaatagcggaactatcaatagaaatattacttctaaaactggaagaaagctcattccctttagtaaccattcatatgcaacaaaaataaccgctgggattaaaccaacaatcccaccatataaaaaaccactgacaattggaatggggtgaaagttatacccacacacattgccaaaacaaatagagtatgtcatggagagaacgagcgtaacgctagataaaaacataataaagtaacgatttggcttcggaggcatttcttgatagcgatttaaacgaatcgcttcatataaaaatagtggcaaaattatgatggcaatttgaatcaataaatcacggataagctccataacctctcatcccctatatgtattttgatatgattatatcattttataggtgtatttgttttaaaattttgatttttcttaacatatttgttaattctttgttaacaactcataataattgttacagattttcgaaatgattgtaaaccctgtaccaaatttccttcgtgcagtatacaatgaatacggattacaaagaaaatataaaaatacttttttagacggacaattatagcaaaatacagcatataatccatactatctatgtttacaaataagtgatcattactttagtaggaggaagataaatatggcgggtactacgcttgttttaaaagaagaaaatttggttgttctagaaaatgttgaaaaatcagtatatgaagagttacagcataaagcgggagatgaaaactgcacatgtgctgtaaacgaatcagtcgttcaccttggcaaggtatcctctgtactctggaatgaagatgaaatagattgggaatacggatattaaaaagtcgcttatagcggctttttttctcttttctctctctttctaaataacatatacaaagcgtaatcatagaaaatatgataaaatgaacttaattttcaaacggaagaaagggagatacaatggaacaattcattaaccctagagtgaaggacatccaaatttctggaatccgtcagttctctaacatgattcaaaactatgataatttgatttctttaacaattggacaacccgatttccctacaccttctctcgtgaaagaagcggctaaacgggctattacagaaaactatacaagctatacacataacgctggtttactagaattacgtaaggcagcttgtaacttcgtaaaagataactacgatttacattattcacctgaaaacgaaaccatcgttacaatcggtgctagcgaagcaattgatgttgcattccgaacgattttagagccaggaacagaagtaattttacctgctcctatttatccaggctacgaacctattattcgattatgcggtgcaacgcctatttttgtagatgttcgtgaaactggatttcgtttaacagctgaagcgcttaaaaatgctattacagaaaaaacaagatgtatcgtactaccgtatccttctaacccaaccggtgtaactttatcaacagaagagctaaaagatattgtagatgttttaaaagataaaaatattttcgtcctttcagatgaaatttatagcgagcttgtatatgaacaaaagcatacatctatcgctcatttcccagaaatgcgtgaaaaaacaattgtcattaacggtttatctaaatcacattctatgactggctggcgtgttggacttttatttgcaccaagttatttagcaggacacatattaaaagttcatcaatacaatgtaacgtgtgctacttcaatcgctcaatacgctgcaattgaagcattaacagcagctaaagacgcaccaaaaatgatgcgccaccaatataaaaaacgccgtgattacgtatataatagactcactcaaatgggattaacagttgaaaagccaacaggtgcattttacttattcccatatgttggtcatttgacatcttcatcatttgattttgcacttgatcttgtcaaagaagcgggactagctgtagttcctggaacagcattctctgaatacggtgaaggctaccttcgcttgtcctatgcgtatagtatcgaaactttaaaagaaggctgcgaccgattagaagcctttctaatgaaaaaagctaagagttaaactcttagcttttttatgcataatgatcacaagtttgacgttttagtaatttatgaggaataatgatacactttgcagtggattctgcattctctactttatcaactaaagcttttgctgcctcatatcctagctgataaatattcacatcaactgtcgaaagtggagggctcgcaatttctgataataaagcattattaaagcttacaatagaaacatctttcggtacaacgaatccttttttagaaagagcacttaacacaccaagtccaattaagtcatccgttgccataattgccgttggcggttgctgcagtcccattaattcctcaacagcttgttgaccactttccctcgaaaaatcaaaatgtaaaatatattcttttggtaatacaatgtctgctaatttcaaggcatcactcataccggctaaacgatctctcgttacaagtaaatctgatccaccaccaatgaacgcgatttgcttatgccctaatgaaattaaatattctgccacttctcttgcagctgtataattgtcattatctacatatgtaatttcatcttttcgatcatatggttttcctattaaaacaaacgggaaattttgttcatgtaaatattgaataatccgatcattctcccttgaatataaaagaataatgccaccaatttggcgtccctgtaccatctttacgacaccattaaaaatttcttcttccgtttcacctgtcgacatgtaaagcgcataaccttctacgtgtgcaaatgaactaatccctcttataacttctgggaaaaatggattttgaaaagctttacttgcagaacttggcataacaagaccaagtgttttcgtcgtttggttcgcaagatttctcgcatttaaattgggatgataccctaattcactcatcactttcctaacacggcgctttgtcttttcacttatacttggattatcagcaattacacgagaaactgttgatggtgcaacattcgcttgcttcgccacatctttaattgtaactgtcataaaaatccccctcctctcatttctctgccatttttcatatattttatctcgcactcattgcaagtcataaactttcatttcttatatcttgcaaaactaatcctattctccctcttcatgtattgtaagggatatagctattttttcctatactataatatactatttatttcacttcttttcacatgtgatgtcaaatctcttttcatctccctataaacttatttatagggagatgaaaagaaaaatgggacgtaatgtcccatttttcatccttttgtacctccagctgttaaaccagaaataaagtatttttgtagtgataggaataaaattgaaattgggatcgcaattaacacagaacccgctgcaaacgttgtaaattcattaccgaatttcttcgcaaccatttcatataatccaactgctaaagtataattttctggtgttcgcaaaataatactcgctaaaatgaaatctgtaaatggaccaatgaaagtaaataacgctacaaccgctacgattggctttgcaagtggcataatgatttgccaaaaaatacgaaaatgtcctgctccatccattcgagctgattcatccagttctttcggaatcgtatcaaaataccctttcataagccatgtattcatcggaatagccccgcctacataaattaaaattaatgcaaggtgtgtatcaattaatcctgttaattgagctaatacgtataaagcaattaacgctgcaaagtttggaatcatttgcagaattaaaaatgttaataaaccattttttcttccaacaaaacgatatctcgaaaatgcataagcggtaaaactaattgctaacactgagaaaatcatcgttaaaacacttacttttaatgtgtttttataccatagtaagtaattactattctctagatctaataacttacgataatgatctaacgttgcattttgtggaataatacttgatccagataaactatcacctggattaaacgatgagcccataatccataataacggatagaaaatgatggcacacattacgaaaataactaaataacttaatgagagacgtaacatcttctgtcttttaatattcatttacatcatatcctcttcttggaatgattttgttctcttaaattgccataacgcaactgtaataacaattaacgataatatcattgtaagagctgctgcttttccgtactgcgctgaagtcatcgttaacttataaatccatgaaattaaaatatccgttccacctgcgtcttgtccagctacagcaggacctccaccattaaatagatagatgatactaaagttattaaagttaaacgtatattgcgtaattaatattggtgctgttgcatataacacaagtggcaatgtaattttacgaaactgttgccaagctgtcgctccatctactgtagccgcttcatataattctcccggaatcgattgcagtatacctgttgtcatcgcaaagataaacgggaacccaagccacgtttgaatcataattaaagcaatcttcgcccaaaatggatctgtcatccaagcaatcttttcaattccgaataaagctaatacttgattgttaatcgctccgaatgtttcattaaacataccagagaaaacaagaatagatacgaatgctggaaccgcccacggtaaaatgaagattgttcgaataatcgcctttcctttaataccaggctgatttacgataatcgctaagaaaataccaagtgcaacttgtaatgttgttgcaacgaatgtccaaatgatagtccaagagaatacacttacaaatgtctctctccacatcggtaaagtgaaaatatcaataaagtttttaaagcccacccaatctactaatttagctggaggagaatgatataaatcatagtttgtaaatccaattaaaattacgaagatgattggaaatacgacaacaaagataagtagtagaaaacctggtgaaaccattaaataaggaaaaccttgatctaacaaattacgatattgctcttttacagaatttaacggtgttccgctatcacgtttctttccattttggtatgcatcatataagttaaatgcatatatgcctagcccaaaagcgataacgataagggccaagattccttctactaatagaaagacagaatggtcacgtggaacttctgtaccaagcgttacaataccccataatcccatatttaataaatcagcaaaggctacaataaaagaacctgttaatactagaaaaataagaccttttacaaattgtttattatacatttggcccacgcctggaatgattgataacatggttgccattttcctatgctttgaatggtttaacccatttgctggttccatagatgtttgcatgttccttcccccttttttcttcctacatggaagggagagaattcgtgcctctcatattagaggcacgaatttcaccttattttttcttgttatgatttgcctcaatattacctttaatttgtttcactgcactatcaagcgccgcttttggtgcctctttatctgtaacaactaattgaagcgcatctccagctggtttccaaacttcttgcatttctggaatgtttggcattggaattccattttcagattgcgttgcaactgcttttgcagcttcgttatctttaataattggatcttccattactgattttactggaggaatttcttttgttttctcaaatcgaatttttgcgttttcttcatttgttacccactcagtgaattttgtagctaaatcattttgtttagagaaacttgttacatgccatcctttaaccccaacaaacgttttcattggttgaccatttggtaatttcggcattggagcaacgccataatcaatcccgttcttttccattgcttggaacgcccatgggccattcatgatagaagctgcttttccttcattgaatagtccatcagcagcaggcccacctgattcaccgataataccttttgggaataatttttccttgtaccatttttgaagatattcagcaccttgtactgctccactattatttaatccaacatcacttgcatttggttttccatctttttcaccaaatacataaccgcccatacctgccatgaatgcattagcaaagtagaagttatctcctaatgctaaaaatccgtacttgccatctttcgtaaattcttttgagaagttaaacagctcgtccatcgtttctggcgcttttggcattagttttttattgtaaataaagactggtgtctcaattgcttttggtaaaccatataattttccgttatatgtctgtgcttctattgatgaattagtaaatttactctttacagcatcatctgctttcacttcagaaagtaaaccttctgttactgcatttccgatttgatcgtgtggcaatgttacaacatctggtccagtccccgctggcccatcaaggcgtaacttcttcacttgatctgtcatttgcatttcaacaacttttacttttactttatatttttcctcaaagcttttcactgctggttctaaaccaacaccttttttatcatcttcccaaacaagaagatcatagtcttttttcgctttactttcctcttttttccctgaatctttcggtccacatgcagataacataccaatagataatgctgaaaccgttaataatgataatgctttcttcatcccaaaaacctccctaaattgtctatgtacctcagtaactgaaaacgtttgcatttaatagtttaattgaagcgcaaacaatatctcaatctatgaaaacgtttgcgctatttgtctatcattatacattcttttattcattttgcaaatattaatttaaaaattatgtcattatactctttatacattgactttatataaaatgaatactactcttataagcaatattaaagctacgagaaaggcaatcgtttgcaatacaggctttattattacacttaagggaatactatgtatagagatattgaagggggattttctatatgtttaaagaagccatttatcataggccgaaagataattatgcatacgcttatgatgaacaaacaattcacatccgagtacgtactaagagagatgatattcaaagcgccgatcttatttacggggatccttacgaatggaaagacgggaaatggatatcagcaagtacacccatgaaaaaaacgggttctactgcattatttgattattggtccattgcaatcgaaccaaaatttaagcgcttacgttatgggtttgaattaaaatctgaaacagacactcttatttatgcagagcgaggattcttttctagcattccaaatgatgatgttggtaactttttctgctttccatttattcatgcagatgatgtattcaaagcaccatcttggattaaagacaccatttggtatcagattttccctgagcgattcgctaatggcgatagtacgctgaatccagaaaatacccttccttggggaagtgcgaatccaactccaactaattttttcggcggagatttttctggtgttattcaaaaccttgattaccttgttaagcttggcatttccggaatatatttcacacctattttcaaagctcattcaaaccataaatatgacacaattgactatatggaaattgacccacaatttgggacgaaagaaacttttaaagagctcgttgaagaatgtcataagcacggtataaaagtaatgctcgatgctgtgtttaatcatagtggatactttttcgagaaatttcaagacgtactagagaatggtgagaagtccgcatataaagagtggttccacattcatgaatttccgattataaccgaaccacttccaaattatgatactttcgcctttacaccgtatatgcctaaattaaatacagctcatccagatgtaaaagaatacttacttgaagtaggacgttattgggtacgagaattcaatatagatggctggcgccttgatgtcgccaatgaagtcgatcacaacttttggagagaattccgaactgaaataaagacactaaatcctgaagtatatattttgggagaaatttggcacgatgcccttccgtggctacaaggcgatcaatttgatgctgtcatgagctatcctgttacaaatgctctactttcttactttgctaacgattccattaaagcaagtgaattcatgaagcaaattacagaatctctacattcctactctatgaatgtaaatgaagcagcatttcatttattagacagccatgatactccaagaattttaacaacatgcaacggagataaaaataagttgaaattgctctatgtattccatctttctttcatcggctctccttgtatttattacggggatgaaattggtatggatggcggcatggaccctgattgccgtaaatgtatgatttgggatactaaagaacaagatcatgcattatttacccatatacaaacattgattttattacgtaaacaacataaagcatttggaggacatggtacttttcaattcatcgaagcaaatgatgaacataattatatttcttatacgaaaacatatgaggatgaaactatctttttcgttttaaaccctactaatagtgaagttacagtttcactccctcttcatgttactggtaagaaaataattaacatttatacaaacgaagaattttcagcggaagcaagtgtattacaagttacacttcctccatatggattctccatattaaaatggtaatccaaaaaagccttatgccaagttcgaaatggcataaggctttttcttatttcaatttgaacactatcgcttcatacggacgtaatggaatgttatctattgatccgatttctacatcgtaattgtgtataaataactctgattcactataactaatatccttaggcatttcaaatacactttcatccgcagtaaagtttgcaatgacaagtagtttttcatctccatatgttcttacataagcaaaaatagaagggtcattatctaatattaaatcatatgatccatacacaactatttcattatttttgcgtagttcaattaatttcttatagtaataaaaaattgaaccttcatcttggattgcttgtttcacattaatctctttatagttaggatttacagtaatccaaggttcaccttttgtaaatccagcgtgattctgatcattccactgcatcggagttctagcattatcacgaccctttatataaatagattccattactttttctatatcttcaccatggtctatcactttttctttatacatatttaacgtttcaatatctcgatattcatcaattgattggaatcgaacgttcgtcattccaatttcctctccttgataaatatatggcgttcctttcatcatatgaagaactgtcgctaacatttttgctgattcaatgcgatacattccatcattaccaaaacgagatacaacgcgaggctgatcatgattattccaataaaggctattccatccggtatgctctaatgctttttgccactttgttaaattctcttttaaagtaagaagtgagcatggttttacatcccactttccaccttctcctgaatctaaatccatatgttcaaattggaataccatttgcaactcttttcgttcttctccagtatacaatttcgcttcttctgtcgttacaccaggcatttcaccaaccgtcataatatcataatgcgataatacttcctcattcatttcatgtaaatatttatgaatgtttggaccgttcataaaatgcttatgacctgaaacatacccctcttcttctgtttcaacagctggtaatccctcttctttagaaataaaattaataacatccatacggaagccatcaattcctttttctaaccaaaacttcatcatttcataaacatcttgtcttaccttttcattatcccaatttaaatctggctgttttttagaaaacagatgtaaataatattcatccgtcatttcatcatactgccatgcagatccactaaaagcagctccccagttgttcggttctttcccttcttttccagggcgccatatatagtaatctctatatttattatcttttgatttacgtgattcaataaaccaattatgttcatccgaagtatgattaacaactaagtccatcataagtttcatattacgttcatgcatttcatgtaatagctcatcccaatcttccattgttccgaactcgttcataattttacaataatcgcttatatcataaccattatcatcatttggagattcatagactggtgataaccaaatcacatcaatccctaactcttttaagtaatctagctttgaaataatcccttgaagatctcctataccatcaccattactatccataaagctacgaggataaatttgatatactacactttctttccaccattgtttttccattatgctaccccatttcattcatcattcatttttctcttttttaaggcgcaaacgttttcattaatgaatgataacagattctatctcaatttaaaatagcgcttacaatttttattgttctttttctaagaaaacatatgaaaaccactaataaatctccaataaatgaaaacgttttatttttttatttattttttgaatctattcgtttataatgaactcaaagaaaacgtttgcataattatttctagggggaaataccatggcagaacttaaattagaaaacatttataaaatatatgataataacgtaacagctgtaactgattttaatttacacattcaagataaagaatttattgtatttgtcggtccttctggatgcggaaaatctacaacattacgaatggtagctggacttgaagatatttcaaaaggcgagttttcaattgatggtaaactaatgaatgatgttcctccaaaagatcgagatatcgctatggtattccaaaactacgctctttatccacatatgagtgtatatgataatatggcatttggattaaaacttcgaaaaataccaaaagatgaaatcgatcgtcgtgtgaaagatgcagcaaaaattttaggacttgaacaatatttagatagaaaaccgaaagcattatcaggtggacagcgccaacgtgttgcgttaggtagagcaatcgttcgagatgcaaaagttttcttaatggatgaaccattatcaaacttagatgctaaactccgtgttgcaatgcgctcagaaatttctaagctacatcatcgccttggaacaacaacaatttatgtaacacatgaccaaacagaagcaatgactatggcttcgcgtcttgtcgttatgaaggatggaaaaatccaacaaattggaactccaaaagaagtatacgaaacgccagaaaacattttcgtgggtggatttatcggctcaccagctatgaatttcttccgtggtaaattgactgaaaccgatttcgttatagacaatactataaaaattaaagtatctgaaggaaaaatgaagatgctacgtgaacaaggctatgtaaataaggaaattgttttaggtattcgcccagaggacattcatgatgaactactatttttagaagcttcgcaatctactgccttcacaacaaaaattgaagtcgctgaattattaggtgctgaatccattttatatatgaaacttggaaatcaagattttgcagcacgtgtagatgcaagacatacattttcacctggtgatcaaattaaattagcatttgatatgaataaagcacatttctttgataaccaaactgaacaacgtattcgctaaaaaatttatctttactatacacatacaaaaaaaccgtccacatatattgagggcggtttttattattatactagggcttctactgtatgaaatgattgtccttttgtgctaataataccgaaaatcggtaaatcactaagcaccacttcttcttgctgtttcataaaagatgacgttaattgttttatctctatccaaacgtcattaatacaaagtacattggaatcgttctcttgttggcgagaaaaaatagaatctattttatataaacctgcattttgaaaaagcatatcaatgcgactgaatgcattcaaagtaatgctaataacgcgttgccaatctccttgctttcccatatcataggatacaaaaagtgcctctccgcctagattcataatttcctccactgttgcttgtccactctcttgatcaatgtccgtcacaataacttttgcgccttgtttagccaacaaaagagctgtattacgtccaataccgatgccaccgccagttacgatagcaacttttcctgcaagcttcattttcattaccccttctataagtcttaccgtcattcagtatactcctttataagattaatctgcaagcaagaaaaattgctattttacttgtaaacgtttactttttatccttcttttttcttattattacgctaatcgaaaactaaaccgatgaaaattaaaatcccccaaaagattacactacctccagtcattttaatctcccccttattatataaagtgaaattttaatcagccccaatatggcggaataaagatattatttttaatcattatatcattttcttatttttcaatctattataaatagaattaacacattttagcttttccttactgtaaacattccccatatacttataaaatcaaaaagacccttttatatataaaaaggtctttttttcattatacaagacttattactttcgtttttgtaattaaatcctgaaaaccacaattatctttgcggaacaacatcatatatatattacatattaatggaattcctaatagcaatacgttcggtaataacactacaaaaaatcttataattaatgtttgcaacgttagcttttcactcttcaatgaaattaattttattctcgttaccttttttccaagtgtaacaccgttccaaataaagggtaacacaataaaatatatcgccattaatataaaaactactgcgaaatcatatctaaaatcacctaagcttatattaaagcgcttaaacatagcactatagtttccggtcataatagctactactacaccatacataaccgagattaaaaacatgtcaattagggaagcacctatgcgattcattacaagcgctggacgatgcatctttaacttcattttatgtcgactccttcatatccttctttacccgtctcatcgtaccacttctaaaaaacattgtaaactagcctttctcttacttttcttgtacaatttgttacaatagcattataaaggaggttcccatattgaaaaaatggataatcctattcgtcgccttcctattaactggttgtacaggaaacacaggtcacttaacttatacggttaacgatgaatacgaactcatacgtacttctggaaatgcatttgaacttttcccctcgcaagatgctgtatatgccacacaatacatccctgcaaaaattacagacattgcttgggatgataaatacattattgcaaaacaaaccgaggaaaaatcagatccgaataaccctgacgcagcaattgcaaataaaaaaagtgaacattattggattattgacgtaaagcacaataaacgtttcggtccctacaatgaaaagcaatttaatgaacaaaaagatgcgtttaaaattaaggtgccttttcaaaatgtagattcatacataaaagaaataaaaaaacagtcagcataatatttgaatgctgactgttttgccttacattattttagtgagatgttaaacgtttgtggctcttttacaacatcttgtgtttctgaatctcctgcaagtaaatcatcagttgtaaactgaatatcctttaccttgtcttttccatcgtcaagtattaaaccaataataccatctcttgtttcaccaggcttatagtcttctcttgatacattttttgtaccaactaacgtatcttcgtcatataaaaagttttgagtggctactttaaaatgttgcttaccattaatcataacatcattcatagagaaaaattgcatatttttatttccggtattctccactttatatgtaatctcaacgtaacgaattgtattactaatctctgttccacttagcgatgcatataattctgcatcttcttggcttactttatcccctaatctccgttttacttcttcaggggttagtgccgtgtatactttcaatgttttttttgccttttcactcatctgtgataaagaaattactttcacatcttgtacgtgaattttcattggcgctacttcaaatgtttgattcacagaatgcatctgctctaacttaaaagtaccccatcctgtttctttcactttttgtcctacttttttcagctcacgcccaccatattcttttgtttcaggaatagattctttcttcttcggttcagctttcttttcttcttgatggaagcaaccacttaacataagaagaaaactacataaaacaaaaatacttttccatgctttcatcatttcatttctcctaacgctatcattcatgaatataaaattagtccctggctttgtaaactatagaaacaatgacaagtccacaaaatgaacttgtcagtccagatactattatacctccaatttggaaaatatgaaaatagggatctaggaacgcgtgcacgataaatataatagttgctacaacaattactgaaacccaatactttcttttttccgaagctaaaataagatctttacccatttcatttctatacttccataaaacgtatactaatagtagaacaccaatacatgtacttccatgttgcatatatttataaacagagataccgtaccattctctttgtaataatggtattttcataacgaaatagcctgtcttatgagtgaatgcatcccaaacaacatgcgtgagcataccgaataatgcagaacagcaaaatacaaaaagatgcttccatgtatgaagcccccaccgcttgtctactgcatatgtatagtagccagcaaacggtttaggtaaatgtgttatgaaaggcttttttaaaatgtaatgatatatgtatgctaacaagaagacaagtggtaaattgaaatataagaatccaagccacgtatgcccaattataccatacggtctaaagtgtaaaaaatattcaaagtcaggcgccatactacctaatataagagccgttactgaaatatgtttagaatgctttttcgcaaaaggaagaactgctgctggatgtgcaaatgtaaacggcatactttaactccttctcacattttcaatagaataccatatatcataacgagagaatggatcttcatgcaatatttattttcacattggaatatgatagtttaaatgatataatccacataaaatattcagaaaataaggaaggaattcaggtgtcattaacacttgtatttgccgcctttttagaatcaaaatccgttatgaattgaggtttatatattgattgacgtaccctttttacaaaatgttacattaaaaaaagaaaatatccctagtttttccgcatatccttactgcttacctgctatccgaacattacaatcactagtttttcatccaaatgtaacattcattattggagaaaatggaacgggtaaatcaacattacttgaaggaattgcaattgcgttaggctttaatgcagaaggtggaacgaagaatttccgctttagcactaacgattcacattcatctttacatgaataccttcgaatttccaaaagtttcaatacaccaaacgacggtttctttcttcgcgctgaatcattttataacgttgcttcttatattgatgaaatagatgctataaaatcttacggcggcgtttcactacacgaacaatctcacggcgaatcattcttttccttatttatgaaccgtttttcaggacaaggtttatacattttagatgagcctgaggcagctttatcaccaatgagacaactttccatgcttattcgaatgcatgagctagtggaacaaggttcacaatttgttattgcgacgcattctcctattttaatggcctaccctgaatccactatatattctttaacacaagaagggattcacgaatccacattagaagaaactgagcattaccaaacgacgaaacttctctttgaaaatcgtgatcgattatttcatcatctatttgagtcgtaaaaaaagaagcagcaatagctgcttcttttttatagtgcttctataaataaggcaaccccgataccgccaccgacgcataaagaggcaattcctttttctaacccacgtctttttaattcgtgaattaaacttactgtaatacgagcccctgtacaaccaattggatgcccaagtcctacgccactaccgtttacgttcactttttcacggtctaagcctaactctttctctacagctaaatattgagccgcgaaagcttcattaatttcaagtaaatctgcatcttccaatgaccaatctactttttctaaacctttacgaattgctggtgctggtccaatacccataattttcgggtctactccagctactgaatatccaacaattctagctaacggttgtaagcctttttctttcgctttttcttcgctcattaatactagaactgcacttccgtcattcaggccagatgcattacctgcagttacagacccatctttacggaatgctggttttaatcctgctaatttttccgctgtaatatctgcacgtggatgctcatccttcgaaaatactacttcttttctacgttcttttattgtaataggaacaatttgatcgtcaaagtgtccagactcgattgccttcagtgccaatgtatgactgcgaagagcaacttcatcttgttcctctcttgtaatttcatattgttcaactaaattttccgctgtttcacccatcataatatggtgaatcggatcttctaacacttcccacaccgtatcacgaatttctccgtgctgtagacgttgtccccagcggtgctgtttcaatgcataagggctcgaactcatcgcttctactccacctgcaacaacaacatcacttacacctaattggatttgcattgcagctgacataattgcttgcatacctgaagaacattgacgttggattgtatatcccgtaactgtgtcaggaaatcctgccgctaatgcagctgttctcgctgtatttgcttcatcagttctttgaatacaatgacctaaaattacttcatcaacttcatgtggttctaccccgcctcgttttacagcttcctgaagtacaggaacagctaattctactggcgttacattttttagcgctcctccaaaagttccaattggcgaacgaactgcagctgtaataacaacattatgcattttgtacttgcccctctcttatgtaccctagtaagtttttaggtgaaattccataagatgtatatctataactatcatactataaacatactaaaaaatcaaaatatttaatataataaaaatagaaggaattaaccttctattctgtcagtgcatataaaaacttttgcaaaattttctctgtcgtttcattcaattttggcaacttatctactggaaaatattgaagtttcaacccttcatgatcgagctttaattccccgctcacatgatgtgcctgatacagatgaatgacattgaaaatttcatcgccattcggataacggaaatatacttcttttcctgatagaacaccaagaaattgcattatttttgcagttaaccccgtttcctcaaataactctctacgtgccgtttcttctgtcgtttcacccagttccatcgccccgccaggtacaccccaatcatatgtatctgaacgatattgaagcaatacttcttgtttatcatttaatataatgattgctgatcctacgagaataagcggtcttgtaccaacgacttttcgtaactcttcaatataccccatatgtaaattcccctttccctaacctcccttatcataacaaaatttctctctttttgttcatgtaattttaaagaaaaaaaggaagctttcgcctccgttttttcatctttatttcttaaaactttcatattttacagcttcaaaagcttcctcaatttcatcattacgataatggacatatgtaaaacgacccaattctactaatcttgctatttcctgtaacgctttatgctgctcatatgtttctttcagcttaatatgtacataaaacttcattaaaggatgttcatataaaggttctcccacctctacatatacatcttcaaccccttgtacaactcttacataactcgcaaattgataaagtgcttctctgtctgaaacgatttttaatgtatacatatattctccccctttcctttactatatcaaaaagacgaccacaccatgttatagaactatgaaattttttcgacttgtcatctatatattcaataaagaaggcgtttatccatacatgacatctttttcccacatatattataggaagaactttttttcatttgaggtgttccttatggatccatacgtcaatatatgtatttgcattactcccggcgccgatatttctgatgaccgcatcgcaaaagatttagctgttgcagaatcaatttggcaccccattacatttcaaattcaagaagtaattgtattaaatgaacttttccgtttttttgaccgtgaaatcagttataaaaattccattcaaagtcaagaaaagttggcatcctttttccaaacatgtgtaaatgaagctcctgaatgcgacctttatatttgttatattggcagtgattatttcaaagaaacagcagtaattgcctgcgcttattctttagcaaaacaacagcaacttactggctatatcgttttaacaaattcggctgcccctacgaaaaatatatatacgctcgctcacgaaatcggtcatattttatttacaagacgtattcatggaaaacttactcatgcagatcctcattctccaaccggctcggagcaccacccttctccaacaaatcttatgtatccgatagtccctcgtccagaaaacgttcatattcattccttattaacaacagaacaaaaagcgctctctttacaaagctctttactacaaagaaaaaaacagtaaccctcatgttactgtttaaaacaacttgttccaatcaacaaacaaaatcccggctgctagaaataaaaatagacaactaaatgtaaatgtaatccctctaaaaatccctatataatatttctttggaaataatttttggtatatccagagcagccgctttttattgaatttctagttcatactttttctttcttcaatttttaaagaccatttcattaatccatatatacttccatacataagtaagacctttgcaattccccaaaatacattactttcttctaaatctttaaataagaacataatcataagaggaacaattagtacaaaaacacccatccagccaagagcatatacttcaccaataagaagtaataaaaagataattgctgctaatatatatgtttgcattgtcgacaattgcaatacaggtgtcccataccatttattcataaacatcaataacaccaataataaaataggaaccattactattacataaatcattccaaattctactaatttacttttaaaagaagacattctaaatgcaacaatcattccaataatcgtaatgattaaaacgataggataaccaattaactgtacatttgttaacgtaaattgttgatcggggcttccaaataaaatatttgtcagtaaccaatatccaccaataccaataatcatccctaaaatactttttatgctcccgcttttatccttctccatctctttcgctaattcttccgcatactcttttggtgagtcaccaaatatgtcacttactgtctttccctttttttcaccttctattaaatgaagctctgcatcttctagaaaagcgtccacatcttcttctttaatcccttttgttattaaatatactttcgtatcgattaaaaacttttcaccttctttagaaatcttcattataactcctcccttatttaatcatttctcttctattcgtcttcatcataatttcaaggaagattaaaataaacaaacttccgtataaacatataatttgaaataacattggcacgagatcttctgatgtaaatgttttaaatagtaacataatcgaaagtggaataattaaatataaatttttaaaccatccatcaaaatacatatttaccgctactgtaatgataaaaataccaccagccaataaataactttgcatttgattgaatataaacatttttgtaggatatatcacatctagtaccataataactcccattaaaaacattggcgctatcattactaaaaaccacatagaaaaccacgtttttgaaaaacttgttacaaaagtcattttgcgaagtagaaaattaggacctataacaactaaaataaatgaaaaactataaccgatacactgaataagtgaaatctgtaacattccatggttcactattaagatagaagcaataatccaaaacgatacgatattcattactgtaaaaccaatttgcttccacgtttcctgtctatccctttccatcacttttacaagttcatctgcatattctttcggtgagcttccgaaaatatcttctacactcttcccctcactctcagcttctattaaatgcaactctgcatcttctaaaaagttttcaatatcactttcttttacactctttgccgtcaaaaataatctcatatctaacaaaaactttcgcgcttcacttgatagcattatttttttctccccttcccttcaagtagacgctctacactactttgcatcgcttcccagcgatccataaattcaccaagtgcttcctcgcctttttctgttaatgtataatattttctctttggaccagatggagattccttcattacgcttgttattagtccttctttttgcattcgtattaataacggataaatacttccctcactcgccattgtaaaaccatacttcgctagcttttcactcatttcataaccgtatatttcgccttcagaaataatagcaagtaagcatccttctaaaatccctttcagcatttgacttgtcgacataatttaaatcctcctaacgatatttttttccaaatgtttgcaggaatttcattatagcttctctaaatagagcactatgaaaactttattatgaagggatgtttttcatcatggttacaaatcgagttgtctttttaacaggtgctgcaagtggtattggttatgaaatgggaaaggcttttgcaaaagaaggtgcaaaagttgtgattaccgatcgacttgaagaacgtgcaaaagaagctgctgaacaattacaaaatgaaggttttcaagctatcggtttaaaatgtgacgttacatctgaagaggaaattacagcagcaatttctcaaacagttgatcatttcggttcattacatatattaattaacaacgcaggaatgcaacacgtttcacccattgaagactttccaactgaaaagttcgagctactaattcaaattatgcaaattgctccgtttatcgcaattaagcatgcctttccgattatgaaacaacaaaaatatggtcgtattattaatgtcgcttctattaacggccttgtcggatttgctggaaaagctgcctacaatagtgcaaaacatggcgtaattggattaacaaaagttgctgctttagaaggtgctacgcatggtattactgttaatgccctttgccctggttatgtcgatacccctcttgtacgtaatcaactacaagacttagctactacacgaaatgtaccacttgaaaatgttttagaagatgttatttatccactcgtcccacaaaagcgcttattacaagtacaagaaatcgctgattatgcgatgtttttagcgagtgaaaaagctaaaggtataacgggacaagctgttgttgtagatggtggttataccgctcaataaaaataaagtttgctcaagaagagcaaactttatttttattcccgaggatcttcgtactttagtaattgccgcgggagcttctcaattgcaacaattaccccctctagtttactttcaatacggtggagtaaatataatgttacaacaatcggaaaccctacattacctatcatcttgatccactcttccatcctcttcccctcctttcattatataagtaagagaaaacactgcatttaggcataaaaaaacaagctattaatatgtaatactgaacctaagataattaaataaatatcattattactacacgacgacgcatgttgtttaacaatgtagttttaaggcgtatcaacactttgcttgatacgtctattttttatgtttttatcattacattcaacctctttatgaccacttttattactacatttatcaagctggcaaattacttattagataataaaaagcttatccgtctgttaactagtgataaagaggatccaacctttctaagtaaaatcggaggaaaatttgaatcaatttggatcgataagaaagtagtaattattccaaacataccaaaaagatatgcatttgccgttttgtcagggatgttaacgagtttaatcggtgaatggattagaagcgattttgaggaaacaccagagcagttctctcaaattgctgtttatatgaccaaagaattaccgaaaagtttagtagcaaaatacgagaaaaaagactagccacttagctagtctttttattatttatctgtcatgtttctgacaattaattgaatggagtgtatttttttatctttatataatttctttacttaacagtgcaaaatctaccgattattgtttatacttcctttttgtgggacacactagaacgtataacctgtttaacagcatgacaaatcaagtgatactaaagggggatttatatggagaagtgtttcacggttaaagaagtagcagccctaatgggctataagaatgaagaaactataaaaagaaagataaaagatggaatgtttccaaaagcctttcaaaatagtcgaaaagaaggttggaagatacctgcaagcgatgtagcaacgttaactggctcttccctagcaaaagttcaaggtaaaaagaaatctctatctccggattacaacaaatctgaattagtcaaattggcatatcaagtgacaactcttacttcccctccagaagaagtacataaaattcttatctctttaccattggagcgtgtgcttgaaatttgtctcattataaggcaacaaagtagaccgattgatgaaccctacaagtttgtcaaagcagctaaaacgaagaattggatgccagatccaattgcagatggagaaaaaaagagattagtggatttgacacagcgtgactatgaatctttggcattaaaggaacaacagacagaaacgattcctctctacaattggctggaacaggaataaaggtggttatataaagatgggaagtttgtatcatcacgtaaaatgccccgaaggggtaaaagctaagaaatttaaattaattgtactggacaaacaccttaaaccattctttccccttacagttttttataaggaggcattgggtggaattacagaaagtagtgcagaatcctatctaaaaacactctatacttttttcacctggttgcatactgacagtaattatcaaggaagagctgtaaattgggatgatgaaccccacattgtacggatagccatagaggattttttgatgcataaagctcattgcaaggttacaacaagcgatagcaaaacgtattacaatgtaaagttaacaaatataagtcctaatactgtcggtaggatgttaagtgttttaaaatctttctacaaaatcatgatacgtatgaaaatatacctttctcccaatccacttattgatgcacacgctattttagacgagtatgaaatgcaaatagagggtgttagggaaggcaaacctagaatgcctaaagaagcaggtacagaagaacctttatctaaaagaggtcgaagattaaccaactctttttttaaaatcataaatggcgagtggaagccagagattattgatgatcctcacctcccctttatgatttataaggctggaaaggatagtaaatggaagcttagagatgaaattattacaacgatgctatttcaaaccggagctagagcgacagaagttatcaaacttacatttggagactatcgtgctaggtatgataagggtgagttttctacatttaataagggaagcgatggaataagaacaaagtttttgaaagtagatactgacacgttaaaactacttgatcgttatatccatggtgctagaaagaaagttgataaaagtggtttgaaaatgaatgaaatccctgatgaaatcccaatatttcttaatcagtatggcaatccctacacttatgatgcctttttaaaaaattggataaacatcatgaaaaaagcagaaataaaaatcaatattcataaaacacgtcattggttcgtgacccgtagtattaggatgattcgcgaaaaatacaaggataaagtagaacaggattatgcaattggacgattacggatttatatgaattggagcgaaaaagcagacacaataaaagtctatgaacatcatgttgatgagaaggattatgtggtagagcaacacaataaattgttagaaatgatgaaaaaggatcaggaggagtatttaaatcagctaaaacctcgtaagagatttaaacaaccttcggttgaacctcgaaataaaattgctcaaatgtctgaaaaacaacatgaattaatggattttattaatgaattgaatagttaatctataaataagcctaagggtgtgggaatgtgattgatgaattaaaaagcaaactatggtatcaagatttaaaaggaaaagttgatgacaacgtccttacatatcaggataaacaaggctacttttggaataaggttaaccctgtgcatttgcgttacttcaaaaacaagtgctgtggttacccttttacaaaccacttagcgctaggattgatggtaatatccaatcaaaacttaaagcctaagactattcacacaaatattgcaagtataaatctctgccttaagcaactctttcaagaaaccaaattggcaagtcttaatgattttgaggtagatatacatctgtccgattatctacgaagggagattcttccctcccattcagataacaagagaattcaactctttactagttataaaaatgttgtaaaaaacgtgcataagtggcattcgaccaagttgacaagggagcaacaagaaatgttcgccccttttttactccctcaaacacacctagatagtagagattttaaagttaataaagcagcaaaggacgcttcgaaaaggaaaaggaagtctgaaacggacgcaatttccaaggaatttataaaaattcgtgccgaaggtgggtttcgtttaaaccaggttaggcgtttgcgacagaaatatcttgaggttgtagaatttgtaaaagataacggatatcctcttccttttgaattttcttatattgaaaacaaggaacgcgaagatagatcaaaggagcttttcttgtttcgattatgggataaaccttctttcgtacttcatcatagtaaaaattattcttacgctaccattaataatgcaaaggggcgaagagctacttttttagatgaaaacaacgaatacttcgtcgagtttttaaacgctgcaatattagatgatgaaactggtaaacccgcagaagaaactgaaggtttttggtttatacccattttagaacatcaattaatcggaagttggtaccgatctttaaataaagaacaaataaatgaaaggttgaaagtacttgaaacctatggatatagggaacccaattcaaaagaacttaataaacctttccaacccgatcataaaggtattctagcacaagggacttttataactaactcccaggaatatgccgagggcattttaatgaacgttgagattttgtatataacagctttgtttggtgcgacggcactagatatatttacgtcttcaggtgcaaggttaggtgaagtggcgcaagttcatcttggtattgggtgtttagaccagataaatatcactgctcccgaaataaatgaaggaaaaacatcttatatatttagagctattccgaaaggaagagatgagttagcagttttttatacgacaaaagatacttttgatttaataaaggaaattgcttttcaccttagaaatcaacattataaaggctcaattccaagggtggatttccgttattcgaagcaatcaggggaatcgcgaccagaccaactctatttatttcagttccatggtaaacattttggagaggtgacttttgcatgtgttttaaatttcatctgttttggattgatctatgaaacacaagacaagaagttggtaaaattgaaaccacacttattacgccacggttttgcgacacacgctgtacaagcagaagaccttccaattgacgtcgtagcaatgattcttaatcaaaaggatttagacgttacaagatattactctcaacctacccaaaaacaagtagccgatgttatttccgagtttcatacttccatggccgctacaactgacatgatgaaagaagttttaagacaaccagaagagatacaagccctttttgagcgtcaaagagagatcagcggcccatttagtaaaaccgttgggggtacatgtgttactaacaagatttgtccaacaaaacttgcatgtgtaggatgcagcactaaaatacctgagccagaacaaaaagatgaattacttgaatatctagattgggcagaaaaatcgaagaagtatcacgaggaaaaaggtttcaaactggaagttttgaaaatgaaaaaaacgatacatgatgcgaaagctgaattgaaagaaatagcattaatcgaggagtataggagagataaggaaaatgagccaagacttatccatagaaaaccataaaagtggtctagagcgtgattacgaaaaaagaagggttaactccttcgaactaggtaaaaaagcaatagataccctccttgcggagggcaaagaagttaccttacacaatgtatctaaaaagacaaaagaactcgatgaacaaggcaaagggattcattttaatactattagaaatcatgaagaactctatgcgtattataaagaaaagagtaagagctataagaaaaaacaaaaagagctagaaaagcatcttccctatcgcgaaaatgaaaaaaatacttttcatgagttcgagcaattaaagacggacagaaatttaaagaatgtgtacaaacaatatatgcgtttaacaaagactgaattagcaacgcgtttgatagaagctgagcaatatatagcagaaggaaatctagagtatttggaaaagttatttgagacatacgagggataaaaattgaattgaaacaataatttgtcgttgttcccacataaaaaataatgtactacaaagataattaatgtattacataaagagacacgaattagagctaaaaaagcttcaaaatgataagtgctttataccgttaataatgtatactggaggaccaattaaataagtgatattaataaaatcaccggtgaaaatataagagtattcattgaatctagtgaattaaagaattcatttgtaatggatattgtataccaaaaataaaaaaactccctaatgctaaaaggagtttttttatcaacatatgttcaattgcaatgttttgcaagtcaagctattttgtgaccttatagatgaattccacgatagcatcatgcatttgatctaacgcgggttgttccactggataatgacctccattttctaacataactattttcacatccactttttttattttgtttaggaatggagtacttaaatgcaacggtgtccatctatcttgttcaggttgtgttaaaagaataggacatacatcaaaatcttctggttccattgctggcttgtaattaccataactgtctaggaatctcatgcttgctttatttgcagcagaggttttatcacgattaaatatttccatcactttctcattattacataaggcactcattttagaagctgtactcattttcatcttaaagttttcaagtcctatgttacttgcaacgcctgccataggtattccaacacgactcataaagagatttttagctgtttcgtcacgaacttgttgatttttttgatccaagaatgtcataccaatgattcctttaactttcttgttttttgcagcaacgtggtaagtttccatcccacctgcacttaaaccatacagtacaatgggtctatcatcacgttgttgttcatagtcgatataatcacttgctaaatccacccagtcatcatactttactacagaacctttttttacttttgtaactccataggtaggcatgtcaatagcaatcgtttcgaatccgtcttttgaaagaggacctcctaaaatcatggacatctgtctaccgtttgtacctactccatgtaataaaataactttaacgggtgcgtttttatttcgaaaacagtctaaatgtacctcatgtcctttccaattccaccattcttctgttggatgataattatctgtaaagtgatattttttaggtaaataagcttgtatttcacgccatgcactttgttcactgtatttcatttcgtttcctccttaaaatgtttaaaataaatttctaaaatcattacgttctaatgttcgaacactcgaacgctttgcaagtaaaatattatttgactcttttatctttgtcaataaatattttttaattcactttgtagaaaaagtagcattgtaaaatactacttttatcattgtgcacactattttttaattatttctttaattgattatcggtttctaatgattcaattagttgttttaataatacaatggagttgtcaagagaaagggcataatacctttcagtagcacgtttttgaacagtaactagatttgcgtttaaaagatgcttcaagtggtgtgaaatagctggtctagataaagaaagtcggtctactatctgatttacagacatttctccttcatcataaagtaacaccaatatatcttgacgatttagatcctgcagaattgaaaaaataggagtgcattctcttaatatgcctattgtttttttgctcatgatatctctccctgtttaattattcgaacccttggacgtttatttagtatagaattttaccaatgtttctgtcaaagagtctttactctcctatttagagatattttgaactcttatgctttaatgtaatcttttgagttgcaattacatatattccttgcttgtctttactataaccctctgctacaaaataatttaacaaatgattattgcagtaatgttatctaagcatcgtatcacaaatacttttaatttgtatatgtttagcccatgaacttattttaatggtctccactttctttcccgatgtttttttctttaaataacatgttatgattcaatcgttcgaatgattaaacaaaagagtaaaggaaatgtgcgcacatgaaaaagcaaaagaaaatagatatattagttttagaaatctttgtggatgaatcaatgaaagttaactttataaaattacttataaactaaattgaacaaattgaataacataggataaattattgggctttttgataagagccaaacttagaggcggaggaattatggtggttaatgtatataatttttatgtaaatggagaatggagagaaagctcttcaggagaaacaattgaaatttcatctccatatttacacgaagtaattggacaagtacaagcaattacttgcggagaagtagatgaagcaattgcatctgcaaaagaagctcaaaaatcatgggctaaagcttccctacaagatcgcgcaaaatacttatataaatgggctgatgagctcgtaaatatgcaggatgaaattgccgatatcattatgaaagaagtcggtaaaggctataaagatgcgaagaaagaagttgttcgtacagctgacttcattcgttacacaatcgaagaagctttacatatgcacggagaaagcatgatgggcgatagcttccctggcggaacgaaatcgaaacttgcgatcatccaacgcgcaccacttggtgttgtattagcaatcgcaccatttaactacccggtaaacttatctgctgcaaaacttgcaccagcattaattatgggtaatgctgttattttcaaaccagcaactcaaggtgcaattagcggtattaaaatggttgaagcacttcataaagctggccttccaaaaggtcttgtaaacgtagctacaggacgcggttctgcaattggggactatttagtagggcacgaaggcatcaatatggtatcgttcacaggtggtacaaacacaggtaagcatttagcgaaaacagctgcaatgattccacttgtattagaacttggcggtaaagatcctggtatcgttcgtgaagatgctgatttacaagatgctgcaaaccatatcgtaagcggtgcattctcttactctggtcaacgttgtacagctattaagcgtgtacttgtacacgaaaacgtagcagacgagcttgttgacttattaaaagcgcaagtagcggaactatcagttggatctccagagaaagatagcacaatcgttcgattaatcgatgacaagtctgctgacttcgttcaaggtttagttgacgacgctgtagaaaaaggtgctacgattgttatcggtaacaaacgtgagcgtaacttaatttacccaacattaatcgaccacgtaaaagaagaaatgaaagttgcttgggaagagccattcggtccaatccttccaatcatccgcgtttcttcagatgagcaagcaattgaaattgctaacaaatcagagttcggcttacaagcaagtgtcttcacaaaagacattaacaaagcatttgcaattgctaataaaatcgaaactggttctgttcaaattaacggacgtacagagcgcggccctgaccacttcccattcatcggtgtaaaaggttcaggtatgggtgcacaaggtattcgtaagagccttgagtctatgacacgtgaaaaggtaactgtattgaattttaaataggcaatcaaaacaagtggcaataaaaagaggaagcatatcctatttttagagtcacttgtttttggattagattcataaaacttattacttcaagcaaagctaattttaaaaataattgtggaaacttactgtaaaaattgggaatgaaattcaatggtctccattttctttcccattgattattcgtgaaataattatgataagatttgaatggttcaatcgattaaacgaagggagatgcagtggatgaagaatgtacaaaaattgaataaattaacagatgattttaaagcatgccaaactgtcttaacagcgattggagactccacacgacaatcgatcattgttaccttaattgaagcgggctgtggagatggaatgagagtaggcgaaatcacacgtaaaacacatttatcacgtcctgctgtttcccatcacataaaagtgctaaaagacgcaaaggttgtcaatgtaagacgtgttgcgacgatgaatttttattacattgacccggaaaataatagtttaaaaatggtgaaaaatttacttcaacagatggatgattacattgatgagcattgggagccatcaaataaataaagaaaggatagaaaaaatgaaaaagactcttttaaatacgacgatgaatagatcaactacattcactgtgaaaaaccgcttttataaagctgcgatgagtgaaacaatggcaacaaaaagcaataatccaacagaagaactagtaaaactatatggtcgttgggcacaaggtggggctggtttactcatgactggaaatgtcatgattgatcgtgaggcacttggcgaaccgggaaatgtcgttattgaagatgaacgtgatttagatatcttaaaaagatgggcaaaatctgggacgcaaaatgggacacagctttggatgcaaatcaatcatcccggtaaacaatctccgaaaacattatctaaaaatccggttgctccaagcgccattccacttactggtgatattaaagatttcttcaataaaccaagagaattaacatcagatgaaatttggcagttaatcaaacgatttggcaatgccgctcgtattgccaaaaaggctggttttactggtgttcaaatccatgcagcccatggttatttaatcaatcaatttttatcccctcatcataatcagcgccaagatgaatggggaggagatttaaatgggcgtatgaaatttttaattgaaacctattatgaaattcgtaaacaagtcggtgagaaattcccaatcgggttaaaactaaattctgctgactttcagcgtggtggtttcaccgaggaagaatcgatgaaagtactaaaaaaaatggacgatttgggtatggatttaattgaaatttctggtgggaattatgaaaatcctaaaatgtttgagggagtacgtgaaagtacaaaaaaacgtgaagcatattttttagattatgctcaaaaggctcgaacactcgtacaagcggtactggtcgtaacaggcggtttccgttccgaagaaggtatgaatgaggcaattgaaagtggagctgtagacatggttggcgttggaaagctatttgcattaaaccctgattttccaaaccagattattcatggcaattattacacagttacgatcaagccaattcgaacaggtgtgaaaaagctagataaaaaaatatcttctatgttagagcttacttggtatgaacatcaatttaaattgatgggcaaaggaaaagaaccaaatcctaatcatagtgtatggaaaacagtactacaaatgataatcgaaaatggaacaaatgcatttcaaaagagacgtgcataaataaaatatagtgtattgttatattattggctcaatacatttcaaaatatgttttgaataaaagtagtaatagaggctataaaaaataggtgtatcaacactttgcttgatacacctattttcatggttttaatcgctaattgtgttaataaaaaacatgtcgtgataaaaggagtggattccccaccttttttattatcatataattgtttaacaacatgccttcgtggctagagttagccctaaaatccattattcttgttcttcagtaaaatatgtattagcttgtttttcaaataatgatgcaatttctcgtttatagtccccgcgtataatacctttctcagtaataattcctgtaattaattcattcggcgttatgtcaaatgctggattataaacatccgttccaattggtgctacttgttttccaaagattttcgtaacttctgtttcatctctttcttcaataataatttcagctccagtttctttcgtaacatcaaatgttgacagtggagcagcaacgtaaaatgggatattaaagtgctttgctaaaatagctaaattcattgtccctattttatttgccgtatctccatttgcgacaattcgatccgcccctacaataattgcatttatttctttcgtttgaatagcatgagctgcagtattatctgtaataagggtcacatcacatgcccatcaacttaagaatttgcactacccccaagtgtcaaaaaacgttattctttctaaaaagctagctagaaacattttagcaaagaaaatgattgattttgtacatgcttaaacaagcgaaaatgtacatgtttatcttgacatttacagagttactcatttttctatcactcctttcatttcgtcctaattactataaccatttaggaggataatcatgagttagaagttaggcacttaattttcttcgataatgtaagtaaaatattccatacataacaaatagcatgagtaaaacttgtaactctacattttcctttaaaatagctgcgatagggtctggtaagtacggtgatttatcgtttgtgtttaaacctaaccatttatttaagaggctaatggtacaaaacataaaaacaccggaccagcttgccgtaattgctttttgtttaatttttgtttcacgttcatcatctgtaatccaaggattagcagttttatcccgcattaacgggcagtaagacccccacctcaaaattcagcggaggcaaagaagttaggtggggatcaactgtccgtaaaagcccgattggttcaactaataatccgtgggggatgaacaaaacccccacggattaaagtttcactttatcactactaaaaaatccatttatgtatccccatataatcattccaattaagatggttatccatttcatattttttgattcacttctcccttgtaaaaagtgttttacatatcagtttttcatatagcaggaataaagtataagatagggaagaaatatgtaagaggatttcataaagagaggaggaagaggatgaaaatcgtttttgttcggcatggtgaaggtgaacatacaacggatttaccagaaagtttacaagtgtttgacccaccattgacgagagtaggaaaggctcaagctaaattacttcaatgcaatgtgccattgcaagagacggatatattaattgttagtcctacacttagaactttgcaaacggcgacaatatggagtgcgaaagttgcttgtcaaaaactagtccatccatatgtatccccacgtatttttccttatcgagaaggagcgaaaacattaccgtgcgattatatagtagatcagggaatgataacaaagttatttccgcatttttcgatagagaaaagctcaaataatcagttatggaaggaaggtataaacactatttcagagaatagttttcagcaaatagtagatgaatttcttctttggtgttatgaactgggtgctgaaagaatttgcattgtatctcacgatggaacaattacagcatataggcaatatttacagaaagtcgttttaactagatcagattttttgaaagaaaggggcatatatgaaatggatttatcccataaaattctgattgataagggctgattataggatgggggttgtatgttgaatattgcattagtagttggttttaattcggatttagaagcgcaatcaattcgagcatctcttgaatattttggtgcaagggttgtgacatattggattggtagaccgaaagattttgtggaagttctttctggaaagaacttatttaacaatattaattatattattttttgctttcatggtgaagaagggaagtttgtcatggaagagttaggcgaagaagtatatgaacaagatgaaccgagaggggattttggtacagaagaaatttataaatatgcaaaattgcataatacacatattgtaaatagcgggtgcacgttaggggagcaaaatctagcaaaatcttttttacatagtggtgcgaaatcatatattggatcgattgattatgtagatggaaatgcagcacttatgtttactatacgcttattttatggggttattaaccatgggaaaacgttagaagaagcgtttcaagaagcgagtttaattgatgaggagacacatacatttcgattctataattagtgtgaaacaagtttattctatattcgaataaacttgtttcacatttaactcacatttttttacatttttttcaatgaaaatggttatcacttgtggtatgatatgttcaagtttttacaggtaataaaagttactatataaacgttagtttttaatgtttcatacgcatgtcacagattattcataattaacgtttgaaaaataagtaactaatgttattatattatctgtaactaacttaattacaactttaggaggaagatatggttattcaatttttaagagaaaacaaagcagtttcttttgcattagcagtaattcgagtatatcttggttacacatggttaatggctggaatcggtaaactacaaggaaaaggattcgatgcaacaggttatttgcaaggggcaattgaaaaatctaaaggtgcacaaccggctgttcaatcttggtgggcatcattcttacaagaatttgcaattccaaatgtagatttgtttaatacacttgtaacatggggagaaattttagtcggaattggtttaattgtaggctgtttaacaaaaacagcggtcttttttggtcttgtaatgaacttttcctatatgtttagtgggtcaattggtgtgaaccctgagatggttatcttatctatgtttgttcttgtttccggtatgaacgctgggaaatttggaatggatggcttcgttatcccgaaagtattaggatcaaaaactccaaaacgccaaaagcaagctgcttaatatatgaaaacgggtatctcattttgagatacccgtttatgttatttttcaactttaatcggattgttcttaaagaaatcttttacatacccgacaaattcttgtggttcttggcgaaatggtgcatgataacctttttcaataatatgtaaagtgctattttttaagaattgatgatacgtttctccttctttccaggaaacgctactatcatttctgccccatataattaaagttggctgttttatttcatttgcattaattttaagacgtctaggccataatttcattttattataatgctcttcatcattacgtttgaatttcactttgctttcatcataatctgtaatagaagaaacggcatttaaatcagtcgacaattgtggttttggtgagccttgtttattaacgaatgtatgagggccacctgtagcatcagttaaaataaggtgagtaactgcttcaggatataaatatgttaaatttagagaaatttctccccccatggaatgccccagtattgcgaatgaatcataccctagttttttcattaatttataatacaaatttgcatgagttggaaaagaataataaaaatccattggcttagatgagcgcccgaatcctaaagcatctacagaaataattgtatgatcttttgctaaatcggagtaaatcttttgaaaaccatctgatgaccctccaaagccatgaatcataagtaaaggtggtttttcattaccaatctttttaaagtaaatggtttgaccatctatttctaccattttttcctcggtagctagtttcgctgtaattgtatttttaacttgttttacttgttctactggcttttctgctgcactacatcctactaatagtgtaagagtaagacaacctaccataaaatagctaaatcgcttcaattaggtgtctcctttctaacataacgctgtatctatcatagcaaatagcatattacgatttccaggaagttggctaccattttttatcataagaggtgaaaggagcgtttcttggaaattttctgtttgaagaaattgacgaaatgtaaattgtgagtgtggaacatcaattcgtactataccattccaacattcacatatcttttttaataattggatagcatcttcttcttgctgggcgataagtggattgatacataatatattgcccttttgtatgcataatgaaaaagcttctatacagttatttctttcaattttaaaagagtgtacggcccttggtaatagcaaagagtaaagtagagaacgattcataccagttgcaatttgatccagagaagtaacaggtataaggtcttcttcttgtacttgttgtaagtgagaagggtacgtcttaatagtttgcttttcaaaacgatgaatcgttgttgctgtttgaaatccgcatgatgtgtatagaggttcgccagcttttgtcgcaataagtgcaatgggttgttttggatgaatttgttccaagcaatgatttagcaacatgcgccctattccgcgtccttgaaaattagggtgaacaattaacataccaatggaagcgaagttacttgtaaagggaaatactcctccagtcgcaatgagtttgttttcatgaatgtaacctacaagtgtgccgatagaaagatacatttcgaattgttttttcataaaaatttcatcgtgtaaccatccaacagatttgcaaagattaagtaattcaaaaataaaagattcatttagctttactattttcataaaggctcaccgcatttctatttattttcataaacatagagtcaaaatgtaaaaaaagagatttacgttaaatgaaatccaacttgtttatatttaaattgtaaagggcggaatgattgatacaaaaagacaaacttatacaaattataactgatatttacataagttaacaaaaaatttacatacagctaattttctcttaatagtcttccattaaatttgatagtgggaaatgaataacctaattagggggacaagacagtgaaaaagtttgtgaaaaaagcatggccatttgcagttgtggcatcattagcagttacttcggtagcaacatggaattttactcgttctagtgaggttaatgcagatgagaacggaagcaatgcaaagattaaaaatgttatcgtattaattggggatggtatgggtccttcatatatgacggctcaccgttatatgaaagataatccaaaaacctttgaaatggaatctacagaatttgataagcatcttgtaggaacacaaaaaacatacccagaagatgaacatgaaaatattacagactctgcatcggcagcaacagctatgtcagcaggaattaaaacatataatgctgcaattgcagttgataatgataaagcggaagtgaaaacagttcttgagcaagcgaaagaaaaagggaaatcaacgggactcgttgcaacttctgaaattacacatgcaacaccagctgctttcggtgcgcatgacattagccgtaaaaatatggacgcaattgcaaatgattattttgatgagaaaattaaagggaagcataaggtagatgttatgcttggcggcggcgtaaagaactttgttagaaaagatcgtaatcttacagaagagtttaagaaatctggttatagctatgtaacggatcgagatcaattgttaaatgataaaaatgatcaaattcttggtttatttgcaccaggtggattagataaaatgattgaccgcaatgagaaaacaccttcattagaagaaatgactaatgcagcaattgagcgtttgaacaaaaataaaaatggtttcttcttaatggtggaaggaagtcaaatcgactgggctggacatgataatgatattgttggtgcaatgagtgaaatggaagacttcgaaaaagctttcaaagcagcgattgagtttgcgaaaaaagataaaaatacgttagttgttgcaacggcagatcacgctactggtggcttatctttaggtgccaatggcgagtataactttaaagtagatccaattaaagctgcaaaacgcacaccagactttatggcaaatgagattgcaaaaggtgcaaatgtagaagaaacattgaaaaagtatattgatttacaattaactccagaagaaattcaagctgtaaatgatatagctccgtcaaaagatgtaacaaagattgataatgcaattgaagatattttcaataagcgctcggttacaggctggacaacaggtggacatacaggggaagatgtgaacgtgtatgcatttggtccaggtaaatacttgttctctggcgttcaagagaatacaaatatagcgaaacgtgtctttgatattgttggtggcggtgatccgaataaaggaagacgctaattaagagcgaaagtgaggcgaactgcctcgcttttctttttaggagttggaaatatgaaaaaaatatttgcgaaattaagattccttctagcatttgtagtattactagttggatgtcaacaagaagagaataatgtagcacaaaaatctactactaaaaaaactgaggaaaaggtacaaataacaaaagaagaagagaaatctattcaagatgttattcatacatttgtgcgaacgaccaatgaaaaaaatcttgcagaacatatggagttattttcaaagaagatgcctagtgctgaagacttaaaaacacaaaaagaagccgcatttcaaaagggaaataagaaaattgaattggaacatatagatatgaaagttagtaaagtagggtatgttattgttgaaacgaaagaaaaggaagtagacgacagtattactcttcaaaagaaagtacagtatgcccttggaaaagaagaggataaatggaagattgaagaggttcgaacaatagagaaaaaataacgtgaaactttaataagtgtggagtcatacttcccaaaaatgatagaaaaaaggttctcattggcgagaacctttttttatagtggtagcataatttgatttgaacatgcctcaatatcatcaatatcttgacgaattgtggccattttattatccagatcttcagctttcattgctgcatcatgtagttcatcttttaaatactccggtattttcccttcatatttataataaagtttgtgttctaaacttgcccaaaagtccattgccagtgtacgtaactgaatttctgcaaatacatcttttgtaccagaatttagtgataaagggtatttaatgatcatgtgtaaacttttatatccgtttcgttttgggttagcgatataatcttttacttctatgacttccatatcttcgcgtttttgaatgacttctttcaaatgatagatatcttctacgaagcaacatgtaatacgaataccaataatatcttgtaaatgtgtttgagcattttcaactgttggtaataagcttttgcgctctagttttttaataatactttcaggttgttttagtcttgtttttatatgttcaaacgggttgtaatcctctagaaattgagcttcccggttcataatttcaaatttagtttttaactcttctaaagcaaatgtatatggtaatacaaaagctttccagtagttaactgttgattgattatattccatttatatacacaccttttcctatttgcaagtgaggtcgttattatactaaataccaaatcatataagcgcaagcagcaaatgatgagatcataaagcgatatttagttttcatactttcaactcctttcgagtaagattttatataaataaacgtgattgttaataagttcactatgtacagtttctatagtaatagattcgtgtgaatttcgtatgaactaattgtttcagctttttgtcttttttgctgttaatcataattattattcggatttaaagtgtttttatttgatttatctatttgtataaattaatgtatatttaaatttacagttatcgaggaggatatatggtgaactttgaagaattagcaattgctagacgttctgcaatgaaatttatacaaggtatagaaatccctgatgaggattttaaaaaaatatttgagttaactaagctttctccatcttgctataatttgcagcacacacattatgttgtaattcgtgatcaagagcgaaaagaaagattaaaagaattagctttcggtcaatataaagtatcgagtgcatcagcggtagtgctcgtttgtggtgataaaaaagcataccaaaatgttgaaaatatttacttcggtatgaaagttttaaaaatgattgatgaatgtgaatatgaagatacaattaggcaaacgaaaggtttatatgaaggaaaaggagagcgtttcatggaggatgaagcgattagaaatgcttcgttaagcgcgatgacttttatgtacgcagctaaatattatggctatgatacatgtccaatgattggtttcgatgaaaaagcagtacaaagtgaattaaatatgccggagcatatagtacctgttttaatgattacgataggaaaaagtgatacgactaaaactcgcccacgaggatatcgaaagccgattagtgagtttgttacatacgaatcgttttaataaagtgaaacttttaatcagtggggggtcttactgcccgttaatgcgggagaaaatttatttaactataaaaacaaggggattctaaatggaatcttcttgtttttgcaattgacaaatggaatgaagttttataatatataaatcgtaatcattacgttttagttgcgatttttgaaagaaaggagaattaaatatgcgtgtaaatattacattagcttgtacggagtgcggtgatcgtaattacatttctaaaaaaaataaacgaaacaatccagaacgcatcgaattaaaaaaatattgtccacgattaaagcgagtaacgttacatcgtgaaacgaagtagaagactagagatatctctagtctttttttatagttctttggttttgtttgttataattaccttaaattgtaataaagggagcggtatgatgaatcaaaaagataaagaaagaaaagagcaagtggctcatattattaatattccagatgaatatagtcttgttgtagatgatcaagaagggggtgatgacccgtatcatctattatggtgggagcataaagaggatcaggagagaacgatacaaattacattgaatagacatactggtaatttaattgaatttaggatagatgatgaaaatcctttttcaagtggcaaggaagcgatagaggagaagaaggcaagagagattgcaaatgcgttcttgaaaaaatatacaaaagaaggatatgaattctatacatatgtaacggttaaggacgacaggcgcggttggaaagaagtaaattatatgcaagaagtgaatagctatccattgccgaatacagggtgcgttgtgcgagtgcactcttcaggtaatgttgtgcattttcattacaatggacaaaaagctatagagaaaaaaccgttatggccaagtgaaattgttgaggagaatatcgttttagaaaatttgaaagctagacaagatatgagacttgtatttatagatttaacatactcttcatgtgagtatgaaaacggggaagaagtaaaagggtaccatcttgtatatgaaccagagcctagtcatgcgtttattgatgcaagtacaggtaaagatttatttggaccagatcattataaattgccttcggctgtagctgttgaaaaatcgaaaaaaggtaacgaacgaggtgaagtattcgaattatttgactggaataaagaaggttttacaaaagtagatgagacagaaaatgatgatgaaataaggatgaaatttgttccgaaagaggaattacaaaaacagaaagaagaaaagaatccatatttaatgaatgaattctttaaaaagcatttaccgatgttgaaatataataatttagttagcgttacaattgataaattaaccaatgaattaactggttttataaaactgacagatgataaagaagtaaagcaaatactgtctagagaggaatgtttacaaagagcacttcaatttttagaacgagttattccagatatcacacaatatctgcgtctttgggaggaacgtgaagaagcagaagatgggattgaaagatttatcttttctgtatatataaatgatattccggcagagtataaccaatttatgattaacatcaatgcagaaaatggtgctgttatgcactactcgggggagtctagcaactttataaaagaattgctcacatatgaaataacaccaaaagtaactaaagaaaaagcgttagaaatatacagagaggctatccgagttaaattagaatggtttttagatcatgatgcagaggaaacgaaatacaaactactttacaaacaaacgacagatgaaaaacataaagaaccttttaattgtaggcgggaaattcgttatattgatgcccaagcggggagaaagatttggagtaagtaaaataaaagagttatttttcaaagaaaataactctttttatttttatactttgcctgttcgtttttcaaaagtaaatgtgataggaagattggaataagaactatcacttttaaatattactttccattctttagtatgggctttaatttcaaaattaagaagattcatcgctctacgtttatctatttctaaaaacatattatgaatctctggttcttgctgtaaattaagagcctttagtgtgactgtaaatgtgaaaaaattctgtccttcatatactatttttgatatttttgttttttgtttatttaacagcacataaaaacggtctgatggagttaattgtacagagtcatcagtaatttcattttcgctattatgaagttcaactaagtaagatgtactatgggaagaatcttttttgcttgtaatctgtaattcagtaggaatcatcggtatttcataaaaatcatttcttattatgttgttgtaatcctctgaaaatttacgaacttcttttgggaaagagtcatcttgtgtacttaaaaaagttttgttttgctttggaatttttttactaaaatttaatgtttctttaaagtaataattggatccagttaaaaataaacaactacagattaataaaaaaattcgatacggattttgaaagtgaaagaataatagtatacatgtaataattccaattacatagaaaataaagataagtagttctagttttgagtgaaaggagaaaccatagttatgaaaaaattttattccagttataatttgagctccaaaaaataaagaaattccaaattgaaaaaataataaatcaggccctcttttaataacaaaagtaatgaacgaaatgaaaagtaaaaatacccctaaataaattgttacatttaataatcgttctaatgtaatcatgaatagtgtcccctttaatagcatattcatatataaataacaattttatttaattataatataacaataaaatattttaaatgttagaagtgttgagttttataaataaactgtacagacacaaacaacctcacgcccacatacacataataaagaccactattttggcggaggtgaaaggtttgagtctattcgccgcaattggatatatggttcgagaagtgtttgtctttgtttcttatgtgaagaacaatgcgttcccgcagccgttatcatcagatgatgagagaaagtacttagagttaatggagcaaggtgatgctcaagcgagaaatcttttaattgaacataatttacggcttgtagctcatatcgttaaaaaatttgagaacacaggagaagatgcagaagatttaatttcaattggtacaatcgggctcattaaagcgatcgagagctattctgcaggaaagggaacgaagcttgcgacgtatgcagcacgctgtattgaaaatgaaattttgatgcatttacgtgtactaaagaaaacgaaaaaagatgtttcacttcatgatccgatcgggcaagataaagagggtaatgaaatatcgcttattgatatattaaaatcagagtctgaagatgtaattgatatgattcagcttagtatggagttagaaaaaattaaagagtatatcgatattttagacgaaagagaaaaagaagtgattgtgaaacgttttggacttgggctagataaggagaaaacacagcgggaaatcgctaaggcgcttggtatttctagaagctacgtatcacggattgaaaagcgtgctttaatgaaaatgttccacgagtttgtaagggcagagaaagagaaaaaagcgaaagagtaaagtgtattagaagcagccatatttaaaatgggctgctttttttattgtaaataagaaaagaaaacgcgttatgctaagaagaaatacacgttcactgttgaaaatgacggattctatctgtaatattagaaggtgctaaataatttaagaataataccatacttagttttctgtatatataataaggctgctttatatgatatgtgggaataagaaccaattttacatatgatatagaaagaaaagaagggaaaactaaagttatagactgattagggggtttcgcaatttgcgacgtacattatatcgacttatgatagaacttacaaatggtcgctttacttcttatatattacgtaaatttgcacaatctcgtttgagctctatcattattccatcgtacgcgaaagtttttcaaattaatcaagatgagatggaaaagggtttgaaggaatatagaacattgcatgaattatttacgcgtaagctaaaagaaggaaagcgtagtattgatacagatgcatcgagtatcgttagtcctgttgatggtgtttttgcagatcatggtcctattgaggatacaaaaacatttgatattaaaggaaagcgctattcaatcgtggatatgctaggtaatgaagaacgtgcaacgcgatatgcaggcggtacatatatggtaatttatttgagtccaagtcattatcatcgcattcatagtccgctttctggttctgtgactgaaagatttgtactcggtagaaaatcatatccggtaaatgcagctggtatggaatacgggaaagaaccactgtcaaaaaattatcgttctgttacagaagtaagcagtgatggcgagcatatggctcttgtaaaagtaggtgctatgtttgttaatagtattgagcttttgcatgagagagacactgttcaaaaaggtgaagaaatggcatactttacatttggttcaacagttgtgttattgtttgaaaaagatatgatagaagtagtgcaggaattaaagagtggacaagagcttcgtcttggtgaaaaaatagctactcgcttagctcataaataaagaaaagcttttataaccgtaagtaagagttatgggcaaagatacttaatgatgaaatcccctagatgggagtacttgtttattcgagagccatcgtaggatggctctttttacagggcatctaataatttatcctttaactgtttgattggtaagggctgattaaactttcactttatatgtaatcaagatgatttgacaagcttgtcctctaatgagcgtctaatgatttcttgttttataagtaaaatgaagtcgggatttaattttagttcttttgctttataataagactcagtgagtaactcagtggataactgttccatatgttttgttttcaaggtgagtcacctcctaataatataaggattgattcgttgatgcatttaatgtaccaaaaaaatatgacagtcacaaacgagtggttatccacatacctaggtggataaagtgtgtatagtttgttagtaaattccaaattaactgcaaaattaatgtggaaaatgtgtacaattttatccacaggttatatatcgaaaaatgttgtcgaaaaattttatgaaaaatcctcaaagaggtgaaagaaattgaaactatttttaccaaatgaatatgtgaaaaatgtatatcatgttcaaccagaagatttaaaaaaacgtgggattaaaggcgttattactgacttagataacactttaattgaatgggatcgtcccaatgcaacgccgcaacttgaaaaatggttcttggaaatgaaagagcaaggcattcaagtaacggtcgtttcaaataataatgagcaacgtgtgaaagattttgctgatccattaggtattccatttattcatagtgcacgtaaaccatttgttcgcgcatttaagcgtgcgatacaagagatgcgtttgcagccagatgaagttgtagtaattggagatcagttactgactgacgtgcttggtggaaaccgagtaggccttcatacaattttagttgtaccggtagcacaaacggacggattagtaacgcgctttaatcgaaaaattgaacgaagaattatgaaaaatatgaagaaaaaaggtttaattaactgggaggaataaagtttgactgaaacaattaaatgtattggttgcggtgtagaaattcaaacagaaaataaaaatgaagtggggtatgctcctgcctcatctttagagaaagaacaagtcatttgtcaacgttgttttcgcttgaagcattacaatgaaattcaagatgtatcgttaacagatgatgacttcctacgcattttaaatggaattggaaaatcagatgcattagtagtcaaaattgtagatatttttgattttaatggtagctggttacctggcttacatcgtttcgtagggaataataaagtattacttgttggaaataaagctgatttaattccaaagtcagtaaaacatgataaagtaaaacattggatgcgctatagtgcaaagcagctaggattaaaaccagaagatgtctttttaattagtgcagcgaagggacaaggaattgctgaactagcagatgctattgagtattatcgcggcggcaaagatgtttatgttgttggatgtacgaatgtaggaaaatcgacatttattaatcgtatgattaaagaatttagtgatgagactgaaaatgtaattacaacatctcatttcccaggaacaacactggatttaattgatattccattggacgaagagtcttctttatatgatacgccaggtattattaaccaccaccaaatggctcattatgttggaaagcaaagcttaaagcttattacaccaacaaaagaaattaagccgatggtattccaattaaatgaagaacaaacgttattctttagtggattggcacgttttgattatgtaagtggtggtcgtcgtgcatttacttgtcacttctcgaatcgcttaacaatccatcgtacaaagcttgagaaagcagatgaattatataaaaatcatgccggggatttattaagcccaccaacgccagaagaattagcaaatatgcctgagctagtgaaatacgaatttaatattcgtgaacctaaaacggatgttgtattctctggattaggatgggttactgtgaacgaaccaggagcaaaaattgttgcacacgtaccaaaaggagtaagtgtttcactacgtaaatctttaatttaatatggagagggatttatgaaacaattatatggtgtaatcggaaatccaattggacattcattatcacccgttatgcataacgatgcatttgaacacttgaatatggatgcccattatcatgcgttccttgttgaagaggaattgctaggggaagcagtaagaggtttaaaagcattaggtatttcaggatttaatgtaacaactccgcacaaggttgctattatggagtatttggatgagattgacccattggcaaggaaaatcggtgcagtaaatacagtggttcataaggatggaagattaattggctataacacagacgggattggttttgttcgagcgctgcagtcaattagtaatgaaccacttcaagggaaacgtattttgttacttggttcaggtggtgctagccgagctatttatttttctcttgctgatgtaggtgtaaaagagattgatgtagccaatcgtacagtagataaggcgaaggaacttattgctgcacgtacggccgatgttaattctgttgctttgtcgttagaaaaagcgacagaagaacaaggaaattatgatattatcattcagacgacaacgataggtatgcatccgcacgtagaatatacgccattacaaatttgttcgttaaaaaaaggaacgattgtatcagatataatttataatccatttgaaacgaaaattttatgtgaggcaaaagagcaaggtgcaatcattcaaaatggtattgatatgtttgtttatcaaggagcacttgcatttgaaatgtggacaggacgcaccccaaatatcgagagaatgaaacaattagttatagaaaagcttggaggctaacatatatgttaacaggaaaacaaaaaagatttttacgtgcacaagcacatcatttaacaccaatttttcaagtaggaaaaggcggagtaaatgaaaatatgattaaacaaattgcagatactttagaagctcgtgagttatttaaagtaagtgtattacaaaactgtgaatttgatcgccgtgaggttgcggaagaacttgcaaaaggtgcacgtgctgaaatcgttcaagtaattggaagcacaatcgttttatacaaagaatcaagagaaaataaacaaattaagcttcctcgataaaaagattagcatgcgctatttttatcgctgatgcgtaatgatgtagagagcgaaaccaattgaacttttattaatagcaactctcttcattcctaaccgaggagagttgctgtatataaaaggaaggggcgtttcttttgaggaaaattggcatcattggcggtacatttgatccgcctcactatggacatttgctaattgcaaatgaagtatatcacgctttgaacttggaagaagtatggttcttgccaaaccagattccgccacataaacaagggcggaatattacaagtgtagaaagtcgtttacatatgttagagctcgcgactgaggcagaagaacacttttctatttgtttagaagagctaagtaggaagggcccatcttatacgtatgacactatgttacaattgacgaagaagtatccggatgtgcagtttcactttattattggtggggatatggttgaatatttaccgaagtggtataacattgaagctttacttaatcttgtaacgtttgttggagttgcaagacctgggtatacattgcatacaccatataagattactacagtggaaattccggaatttgcagtttcttcatccttattacgtgagagatataaagagaagaaaacgtgtaaatatttacttcctgaaaaagtacaggtatatatcgagaggaatgggttgtatgaatcgtgagaatgcactgcatattgtcaaacaacaaatgcatgaaaaacgttatatacacacaattggtgtaatggagacagcgattgagcttgctaagttatacggtgtggacgagaaaaaagcagagatggcagctatattccatgattatgcgaaatgtagagcaatttcagaaatggaagagattattaaacgtgaagatttgccgaaagatttactttgctataacaaagagttatggcatgcacctgttggggcatacttagtagaaaaagaagtaggcattacggattctgaaattttgcaagctattacatatcatacaagtggtcatgagaatatgacgatgttagataaagtgatttatgtagctgattacattgaacctgggcgaaagtttccagaagtggaagaggctcgtaaactcgcatatacggatataaatcaagccctattatttgcgttaaagagaacaattcaatttttaatggaaaaagatcagacgatttatccattaacattccaaacatacaatgcagttatcaaggaggaaatgagtaaatgaacgataaagaattattagtattagcggcaaaagcagctgatgataagagagcagaagatatggttgtcctaaatatgcaaggtatttcaccaattgcagattatttcattatttgtcacggaaattcagataaacaagtgcaagcaattgcacgtgaaattaaatcaaaagcacatgagttccaaatcgacgtacaacgtatggaagggtttgacgaagcacgttgggtattagttgatcttggagatgtagttgctcatgtattccataaagatgagcgtaatcactataatttagagcgtctatggggtgatgtgccacgtgaagatattacagaagagttaggccaatgaaatacgaacaatttgcattgttgtacgacgaactaatgaatgatgtcccttatgataaatgggtggaatttacagagggaagtttacagcaggcaggtatgaaagaggcaaaaattcttgatgtagcatgcggtacaggtaatgtaaccctgccgcttgtgcaaaagggttacgatttaataggtgtcgatctttcagaagaaatgttaacagtcgctcagcaaaaactaggcggagaagggcattttattcctttttaccaacaagatatgcgcgagcttgatgttccgggtgagtttgactgtgtaacgattttttgtgattcattaaattatgtattgcaagaagatggagtacaagaaacatttagaagagtatttcaccatttacgtcaagatggtttgtttttatttgatgtacactctttatataaaatacatcatgtatttcaaaatgaaacgtatacagtgaatggagaagaaatatctcttatttggaattgcttccctggtgaagaatcaaatagtgtagagcatgatttaacattctttgttcaagatccagaagaagatgtgtaccatcggtttgacgaatgtcacgtgcaacgtgcatatcaagtggaagagttaacgaaatggcttgaagaagcaggttttacagtgcttcgtgtaacaggtgattttgagcgacttgaagttacagaacaaacagagcgtattttcttcatggcgaagaaaaacggataaaaacaaaagcaaccgagaaggttgcttttgttttataaagaagatgtatttttagttctagcataatctaaagatcgtatgcgtaaagtgtgggaatagtagttgaagtgaaaatgtattgtaaaaaagtaagtatttataaaaaggatttggaatgaaaatgacgtatttattatgtgtgtttattgaattgctgatcaacgcattctaaatcttcatcaaatttttcatgtgttcgctcgattaacttatggaacatatctccaacgtgttcttctaaaacccgaatgccttccccagtaacgccgcctttcacgcaaaccttttcttgtaaggtaggtaatgtgaagatttctttttcaagtaatttccccatccccacgaccatttcacttactaaagtagtagcctcttcgtgtgtaatatttgttttatctacagcagcgttaatgaagcattgtagtaaataactaaagaaagcaggaccgcaacttgctatatcagatgaaacgcgcgttatatcttcttttattacaagaggtgtagaaatgtttttgaatagacgaagtagtttttgttgccattcttcagagcaattatctccaaatgtaaatagtgaggcgccagagagagcgcgatttgtgatacttggaatgatacgcgcgacgtggcaaggtacgagagtctctaattgtgatggagatattggacttgtaatagaaactaagcacgtttcatcagaaaaatgttcagcgtatttttttaggatagggtatatatctatcggcttaacacaaataaaaataagttgtgattgttcgattacttccgggattgtttttgctatctgaacagaagggtatttttcttttatatgatatgcttttgcgggcgtccgattaatgattgtaaggcaagaaggtttgacagcacgggtttctaaaaatgcatcgattagtatatttcccatgtttcctgtccctataattcctatgttcaaagtttcatccctccttcgtaacagctttctcctaaacaatatgaatgatgttataaatttatgattagaggtgtaaaatgatgtgggattttccgaaaaagtggttaggtttagtagctattattggaactttactttttcttgttttttggaaaacgaatcagaatgtagaacgaacgcctattacaatgaatgtacaagagaaggagatagaaaaaaagggtaaaccgaaaatatcggatacaaaggaacagaaaagaacaattataattgatgtgaaaggagcggttagtaaagaaggggtatatgaaatgaaggaaggagatcgcgtaaaggatgcggttcaaaaggctggtggttttttatcagaagtagatatgaaaaaagtaaatttagcacaaattgtacaagatcaaatgcttctttatataccgagtaaaaatgagtcagaacaaggggtgcttacttcttctaaggaagatggcaagattcgaataaatacagcggcgaaagaacaactagaaaaaattacagggattggctctcgaaaggcagaaagtattttgaaatatcgagaagaacatggtccgtttcagaaaatagaagatttattagagattgatgggattggtgcgaagtctcttgaaaagataaaaggtcaaattattattccgtaaaagattgacgaagtttttcttctttcgctacactacaagtagacaaaaaagtaggtgaaaaatatggaacgaatttcatgggatcaatattttatgacgcaaagccatctactatctttgcgtagtacatgtacaaggcttgcggtaggagcgacaatcgttcgcgataaacgaattattgctggtgggtataatggttcaattaaaggtggcgtacattgtatagatgatggttgttacgtaatcgataatcattgtgttcggacaattcatgccgaaatgaatgctttattacaatgtgccaagtttggtgcgaaaacagaggaagcagaaatttacgttacgcatttcccttgtttacaatgttgtaaggcaattattcaaagtggtattacagcggtttattatgcgcaggattataaaaatcatccatacgccatagagttatttgaacaagcgaacgtaacagtgaagcacgttccgctagaatatgatattgctgcattagaggagcaaaaacgttatacagagttgaaagaattatttgcgtctttagaaaaagataatttatcaatggaagaattacagcatgtattcacgaaagcaaaaatgatgctataaggagtgagtataagttgcaggaacaatgggggtatgttgcaatctcatttataataggggttgcaattgccttttcctcgtcacttttattgatagttttttgcctctttttaaatgttttcttctgtttatatcgcacttcgcgtaaaaccttcattttttgtattgtagcgtgctttaatagcgccatatacacttcctatgttcaaacgtggaataagcctctaggggagtcctatggagttacaagaggggttatacaaaatgcaccgcttgttaatggggatcgcctatcttttcaatttgaagatcagaataaaaatatagtgcagttaagttatagaatcaaatcagtcttggaaaagaaaaaaatgcaacaattatacgcagggatatcatgtgtattcgagggtgagaggaaagaaccggaaacagctcggaattttcatggttttaattaccgtgattatttatacaaacaacatattcatttcacatttgaggctacatatatttctgaatgctataaaacatcactgtcgctcacgcaatggattcttcttttgaggcaacaagtaatctcgaaagttacagaaatgtttccagagcaatcaggtgcttttatgaatgcattactatttggtgatagacaacaaatgacgtttgaagtggaagagcaatatcaacaatttggtcttgtacatttgttagcaatttcaggttcgcacattgtactgttaatggtgatagtatattttattttgctaagaagcggtgtgacaagggaggtagcaacaatttgccttatcgtttgtattcctttgtatatggttttagcaggggcgtcaccctctgttataagagcttctataacaggagttttgatgttaattgcttttatgtgctcgattcgtttatctagtttagatgctttaagtgtaacagctatatgcatgcttatatatgacccttatcttgtttttaatattggatttcagttttcttttgtaggtagcttcgctttacttttgtctgctccgttattgttagagagtagcaacggagtaatccgaaattctatttatatttctatcatttcacagctcgttagtactccgattttgttataccactttggttatttttctccatatagcattctcctcaatctcttatacgttccgtttttatctatcattgtattaccatgtagcattattattttactgtgtatgccaattgtcccgtttctcgcaaaaggatttgccgatgtattatcaataggcttgagtatgtctaatgattttctaagttattgtgaaagtttaccatttacccagcttatcttcggggaaacgcccttcaatcttgtagctgtatattgcgccagtattgtcagcatattgatggtttgggaacggagagcgccgaaaaaaatagtttgtatagttgcgagtgtatttctttttattagcacatgtcattatatatatccatattttagaggcggcggaagtgtaacatttattgatgttggacaaggtgatgcaatattaattcgccttccgtatgataaagggatttatcttattgatacaggtggaacgcttcgtgtgaataaggaagaatggcaacaaaaaaagcatgaattttctgttggaaaggatgttttaataccctttttacaaaaagaaggtattaaaacaattgataaattaatcgtaacgcatggagatgcagatcatataggtgctgcgcaagaattattatcatatatacctgtaaaagaagtggtatttggccgaaagggaaaagatgcagtattagaaaaagtagtaaagaaacaggcattagaaaaggaaatgaaaataactgaagtgggggaaggggagagttggagtgtaaatgaagcggaatttttcgttttagctccaaaaggaaaagaaaaaagcgaaaataacgcttcaattgtaatatgggcaaaatttggagggttgaagtggctatttacaggcgatttggaagaagaaggggaaaagattttagtagaggcatatccagatttacaagtggatgttttaaaagttgctcatcatgggagtaatacgtcatctatagagccttttttgaacgtcatacagcctcgtgtagcgattatatctgttggtaagcagaataggtatggacacccgcataaagaagtgatagagcgttttgagaagatggggagtgcgatatggcgcacggacaagcaaggtgctatttcctatgtttttaaaggggaaaatggaacctttaaaagtaaaatcacatatgataaaacacataatagatgaaaaagagaagactgccatgaagtggcagtctttaagaaccgataaatttaataacagttgcaatgatgaaaagtgttgcgaaaaaaccaaatgagacgataaatcctacccctgaatcaatagcgtcattgcgtttactttgaacgttttgttcaaaatcattcatttagaatccctccccaacattccactttagtataaaatattgtcagaaaaaaatctacaatttccatatgaagagaaaacgagcttttttgttacttgtaaatcatgaagtaatgtgagtttttcgtttccaagcatgttaacagttggcacttatactcaaatttttattgcgaataataaagggaaggtgattaccgcacaccaataagaaacccggggcttattgcgtggcgtttaatataaataaagggacgggttataaagcctgttcctttgtacttgtaaaacaaaagctagggcattagtataaatatatattgccaagttagggagtaggaaaaagtatgagtgatatacataaaaaaattaaaaagaaacagtttgctccgttatatttaatatatggaacggaagctttttttataaatgaaacgataaagcttattacgacagaagcacttgaagaagaagatcgagagtttaatgttgtgacatacgatttagaagaagcgtatttagaagatgtggttgaggatgcgcgtacgcttcctttcttcggagaacggaaagtactgttaataaaatcaccgctatttttgacttcgcaaaaagaaaagttagagcaaaatataaaaattttagaagaatacattggtgaaccttctccattttctattcttgtttttgttgcgccttacgaaaaacttgatgagcgaaaaaaaattacaaaactattaaagaaaacagcagatgtagtagaagcgaatgcgatgcaagtacaggatgttcagaagtggattgttgctcgtgcagatgaagtgcatgtgcatattgataacgcggctgttagtttgttgctagagcttgtgggaagtaatgtaacgatgttggcgaaggaaatggacaagttaacgttatacgttggtatgggcggagagattacgacgaaacttgttgcagagcttgtgccaaaatcagttgagcaaaatgtatttgctttgacagaaaaagtggtgaaaaaagatattgcaggtgcaatgcaaattttggatggattatttacgcagcaggaagagccgattaaattgcttgcgttattagtgagtcaattccgcttgttgtatcaagtgaaagagctacagcaacgtggttatggacaaaatcaaattgcgtctcatattggtgtacatccgtatcgtgtaaagttagcaatgaatcaaacgaagtttttctcttttgaagaattaaaaaaagtgattatagaattagcggaagctgattatagtatgaagacgggaaagatggataagaagcttgtgctcgaatttttcttaatgcgattaaatcatatgtgatgacacaaaaaagttcatgcacttagtgcatgaacttttttgtatataaaaaaacgatccaaatggatcgttttttaaacgccttacgcgtttacttgtttcgctaagcgagatttttgacgagctgcagcgttttggtggataagacctttacgagctgctttgtcaagttttttagaagcagttttgaaagcttctttagcattttcaagatcgttattagtaactaaagcttctacagttttaacagcagaacgcatgtcagacttgatagaagcgttatgtgcacgacgctcttcgctaagtttagcgcgtttgatagcagatttgatgtttgccatacttttcacctccctggtgcaatcgaatgactcgattcttacatagaacaagtgatattctatcaaacggtgaagagaattgcaatagtatatccatgaaatttcacgtaaaggaaagaatgaccttatataactttgggaaatctaacgatatttactatgaattacggaggagatacgatgaaagaaccattagatttaagtaaatatagcattagaactgaccttgctgtagaagctcatcaaatgttgcaagaaagccaagaagaacaaaaagggatacagggagttattgtaaaagagagagaagaagaaggtactataattacaaaagtaacgattgatgaagctgcctctgaagcgatggggaaaaaacctggaaattatttaacacttgaagtacaagggatacgtcagcaagatacagaacttcaacaaaaagtggagcgtatttttgcaaaagaattttcttgtttcttagaagaggttggagttacaaaagaagcaagctgtttaattgtaggtcttgggaattggaatgtaacaccagatgctcttggaccgatagttgtagaaaatgtattagtaacgagacatttgtttcaattgcagcctgaaagtgtagaagaaggatttaggcctgttagtgcaattcggccgggggtaatggggattacaggaatcgaaacgagcgatgttatttatggaattattgagaagacgaacccggactttgtaattgcaattgatgcattagctgctcgttctattgaacgagtaaatagcacgatacaaatttctgatactggaatccatcctggatcaggggttgggaataaacgtaaagaactaagtaaagacacattaggtatccctgttatcgcaattggtgttccgactgtggtcgatgctgtttcgattacaagtgatacgattgattttattttgaaacattttggtcgagagatgaaagaaggaaataaaccttcacgatctttgttaccagcgggattttcatttggagaaaagaaaaaattaacagaagaagatatgccggatgaaaagagcagaaatatgtttttaggtgctgttggtacattggaagaagaagaaaaaagaaggctgatttatgaagtgctatctcctcttggtcataatttaatggtaaccccaaaagaagtagatacttttattgaggatatggcgaatgtaatagcgagtggtttaaatgcagcgctacatcatcaaattgatcaagataatacgggagcatatacacattgaggggaacagatgattatggtttgagtcgctttgcgcttttgtgtatatgtagtgtagctttatgtttacttatgatgatagcaggagtggcacttgctaatcatggtttgaaaagtatgaaaggctatcagcaattgtcatatgaacaaatagctcatatgacagggacagaaagtacaggtgctgaatcagaaattttgggtagctcgttttcggcctcagaaaaacaacagcaattagaacgtttaagaagttttaatgttgtagaaggaattgggatggcggtagcaagtgtagcttatgaaatgacgaagttcgggacggatatagttgttgggaaaataaaaggaatttttagctaagagtaacatgggaggcggttgttttactgatttgtaggacagccgttttaaaatttgaaaagggtttgtctcttatggtttattcgcataagatatagatagaatgatttgtatcgtaagcagcacgagttttcattgaatctttgttgctctattgatataatcagtgctagtgtatattggcgagactattaggagttgagaacatagatgaataaagaagaaagagcaaaaagacagtccaaaattcgtaatttctctattattgctcatattgaccacggaaaatcaacgttagcagaccgtattttagagaaaacaaacgcgttaacacaacgcgaaatgaaagctcagttgcttgactctatggatttagagcgtgagcgtggtattacaatcaaattaaacgcagtacaattaaactataaagcaaaagatggtgaagagtatattcttcatttaattgatacaccaggacatgtcgactttacgtacgaagtatctcgtagtttagcggcttgtgaaggcgcgattcttgtagtagatgcagcgcaaggtattgaagcgcaaacgttagcaaacgtatacttagcgcttgataacaatttagaaattttaccagttattaataaaatcgacttaccaagtgcggatccagaacgtgtacgtcaagaggtagaagatgtaattggtttagatgcatcagaagcggtacttgcttctgcgaaagctggaattggtattgaagaaattttagaacaaattgttgaaaaagtaccagctccgtcgggtgattcagaagagccattacaatgtatgattttcgactctttatatgatccgtaccgcggtgtaattgcttatatccgtgttgtaaatggaacagtaaaagttggcgataaagtacgtatgatggcaacgggtaaagaatttgaagtaacagaagtaggtgtatttacaccgaaaactacgcaacgtgacgagttaacagtaggtgatgtaggtttcttagcagcatcgattaaaaatgttggtgacacacgtgttggtgatacgattacacatgcgaaacgtccagctgcagagccgttagcaggttaccgtaagttaaatccgatggtattctgtggtctgtatccaattgactctgctcgttataacgatttacgtgatgcattagaaaaattagagttaaacgattctgctcttgagtttgaaccagaaacatctcaagcgctaggatttggtttccgttgtggtttcttagggcttcttcacatggaaatcattcaagaacgtattgaacgtgaatttaagattgacttaattacaacagcgccaagcgttatttataaagtttatttaactaacggtgaagatgttattgttgataacccatctaatatgccagatccacagtctatcgatcgtgtagaagagccgtttgtgaaggcttcaattatggttccgaatgactatgttggagctgtaatggagatttgccaaggtaaacgtggaacgtttattgatatgcaatatttagatgaaacgcgtgttacattaacatatgaaatcccgttatcagaaatcgtatatgacttcttcgatcaattgaaatcaaatacgaaagggtatgcatcatttgattacgagttaattggctataaaccatctaaacttgtgaaaatggatattcttttaaataatgaacaagtggatgctttatcatttatcgtacaccgtgattcagcgtatgaccgtggtaaagtaatcgtagagaaattaaaagaattaattccgagacaacagtttgaagtgccaattcaggcgactatcggaaataaagttgtagcacgttctacaattaaagcgatgcgtaaaaacgtacttgcaaaatgttacggcggtgacatttctcgtaagcgtaaacttcttgataagcaaaaagaaggtaaaaaacgtatgaagtctgttggttctgtagaagtaccgcaagaggcatttatggctgtactgaaaatggatgacaactaatatttgaaataaaaaagaagtcgtttgtgcggcttcttttttctgtataattactttttagacatctgagcagctctcatttacaataatgagagagctttttagttcatatagagttaggagattgttaatgtccgaaaatattcgaaaagatattcaagataaaatacaaaatggtaattttaattgtgaaaaggaattgacgctttctattattagtggaaagtggaaagttgtgatactgtggcatcttggtgtggaaggaccacatcgtttcagtgaattacaacggttattcccaagcatttctcataaagttttgtcgaaccaattaaaagagttaatggaagatggaattgttgatcggacagtatatcccgaaattcctcctcgcgttgagtattatatgacggaactaggcatgtcacttttaccgatcgttgaaatgatgtatgattggggaaaaatgcgaatggaacaaattcgtaatacgttagagaagtagagaaccctccggagtgcggaggttttctttttagaaaggtaggagttatatttggtacaagctgcatatattcatattccgttttgtcagcacatttgtcactattgtgattttaataaagtgtttattgaacgccaaccggttgatcaatatttagattatttagagaaggaaataataaatacggttcaaaaaattccgtttgatagtataaaaacgatttttgtgggcgggggaactccgacagcgttaaatatggaacagacaaaaaaattactcgagattattaatcgtcatttgcgtccgttcgccccaaattgtgaattaacatttgaagcgaatccaggagatctgccgaaagagaagttgaatgtactgctagaaggtggagtgaatcgaattagttttggtgtgcaaacgttccgtgatgaactgcttgagaaaatcgggcgcaagcatacgagggaagatgcattcctcgcgattcgagaagcgcaggaagtaggatttaaaaatattaatgtagatattatttatgctttgccaggacagacgatagaagatgtaaaagaaacattagatattgcttttacgcttggtgtacaacatttctctgcatattcattaattgtagaacctaaaacagtgttttataacttaatgaacaaagggaaattgcgtcttccgggtgaagaccatgaagcgaaaatgtatgaaatagtaatggatgaaatggagaaacacggttataaccagtatgaaattagtaatttctcaaaaggtgacaataaaagtagacataatctcacatactggaataatgaagagtattatggatttggagctggagctcatagttatgtgaacggggaacgtattcaaaatgtaggtccgctgaagcaatattttaataaaattgatgaaacaggatttccgtatttagatgttcacaaagtgacggagaaagaaagaatggaagaagagctgttcttagggcttcgaaaaacaaaaggtgtttctaaaacggcgttccgcaataaatttaatatagagatggatcaagttttcgcgaagcagttacaaagcaaccaagagcagggattgcttgaagaggaagatggacatgtgcgtttaacgcgaaaaggaaaattattagggaatgaagtattccaatcatttttgattgactaattaaatgttccataggcgtgaaaaagtttcattatttcgtgacgtttccgttgacaattgaatgtcaattttggtaagttattaatagatttagcactcaaagacaaagagtgctaacagaggtgatgatgagatgcttacggaacgtcagctcttaattttacaaacaattattgatgactttattggatcagcgcagcccgttgggtctagaacgttggctaaaaaagatgaaattacatttagttcagctactattcgaaatgaaatggcggacttagaagaattaggttttattgaaaaaacgcacagttcttctggacgtgttccttctgagaaaggctaccgattttatgtagaccatcttttagcaccgcaaaacttaccgaacgctgaaattgtacaaattaaagatttatttgctgaaagaatttttgaagcggaaaaaattgcacaacaatctgctcaaattttatcagaacttacgaattatacggccattgttcttggaccgaagttaagtacaaataaacttaaaaatgtacaaattgtgccgcttgatcgtcaaactgctgtcgctattattgtaaccgatacagggcatgtacaaagtaaaacgattaccgttccggaatctgttgatttatcagatttagaaaaaatggttaatattttaaatgaaaagctatctggcgtaccgatggaagaacttcataataaaatctttaaggagattgttacagttttacgtgggtatgttcataattacgatagtgcaataaaaatgttggatggtacatttcaagttccgttatcggaaaagatatactttggaggaaaagcaaatatgctttcgcagccagagttccatgacattcaaaaggttagatctttacttaccatgattgataatgaagccgaattttatgacattttgcgtcataaacaagtcgggattcaagtgaaaattggtagggaaaactcttcgacggctatggaggattgtagtttaatttctgcaacatattcgatcggcgaagagcaacttggaacaattgctattttaggtcctacgagaatgcaatattctcgtgtaattagtttgttacagttatttacgagacaatttactgatggacttaaaaagtaaatgagagtaatacattcgctcaagtgatgaaattttcattgctgtgtgtaatatataatgcttaggtaatcatgctatgcatgatacctaataccttttaaggaggtgaatattgtggaagagcgtaacgaacaagtggtagaagaagtaaaagaagcgcaagttgaagaagctgtcacaccagaaaacagtgaagaaactgtagaagaaaaaagtgaggctgctcttttacaagaaaaagtagatgagctacaagcgaaactaacggaaacggaaggtcgcacattacgtctacaagctgattttgaaaattataagcgccgtgtccaaatggataaacaggctgctgaaaaatatagagcacaaagtctagtttcagacatcttgccagctcttgataattttgaaagagcaatgcaagtggaagcgactgatgagcaaacgaaatccttgttacaaggtatggaaatggtgcatcgtcaattgttagaagcgctgactaaagaaggtgtggaagtgattgaagctgttggtaaacagtttgatcctaatgaacaccaagctattatgcaagtggaagatagtgaatttgaatcaaacgcggttgtggaagaattccaaaaaggttataaactaaaagaccgtgtgattcgcccatcaatggtaaaagtaaatcaataatttacataaaactaggaggattcgccatgagtaaaattatcggtattgacttaggtacaacaaactcttgtgtagctgttatggaaggtggagaaccaaaggttatcccaaatccagaaggaaaccgtacaacaccttctgttgtagctttcaaaaatgaagaacgtcaagttggggaagttgcaaagcgccaagcaattacaaacccaaatacaatcatgtctgttaaacgtcatatgggtacagactacaaagtagaagttgaaggtaaagattatacacctcaagaaatttctgcaatcattttacaaaacttaaaagcttctgctgaagcatacttaggtgaaacagtaacgaaagctgttattacagtacctgcatacttcaacgatgcagagcgtcaagcaacgaaagatgctggtcgtattgctggtttagaagttgagcgtatcattaacgagccaacagcagcagcacttgcttacggtttagaaaaacaagacgaagaacaaaaaatcttagtatatgacttaggtggcggtacatttgacgtatctatccttgagttagcagacggcacattcgaagttatttcaactgctggtgacaaccgtcttggtggcgatgactttgaccaagttatcatcgatcacttagtagctgagttcaaaaaagaaaataacattgatttaagccaagataaaatggcgcttcaacgcttgaaagatgcagctgaaaaagcgaaaaaagatctttctggtgtaacacaaactcaaatttcattaccattcattagtgctggagctgctggtccattacacttagaattaacgttaacaagagcgaaattcgaagagctttcagcaggtcttgttgaaagaacattagagccaactcgtcgtgcattaaaagacgctggttttgctccaagcgaattagataaagttattcttgttggtggatctactcgtatcccagctgtacaagaagctattaaacgtgaaactggtaaagagccatataaaggtgtaaaccctgatgaagttgtagcattaggtgctgcagttcaaggtggcgtacttactggtgatgtagaaggcgttctattattagacgtaactccactttctttaggtattgaaactatgggtggcgtgttcacgaaattaatcgagcgtaacactacaattccaacaagtaagtcacaagtattctcgacagctgctgataatcaaccagcagtagacattcacgtattacaaggtgagcgtccaatgtcggctgacaacaaaacgttaggtcgtttccaattaactgaccttccaccagcaccacgtggtattccacaaatcgaagtaacattcgatattgatgcgaacggtatcgttaacgtacgtgcgaaagacttaggaacaagcaaagagcaagctattacaatccaatcttcttcaggtctttctgatgaagaagtagaacgtatggtacaagaagcggaagcaaatgctgacgctgaccaaaaacgtaaggaagaagttgaacttcgtaacgaagctgaccaacttgtattccaaacagacaaagttgtaaaagatttagaaggtaaagtagatgcagctgaagttgcaaaagcaacagaagcgaaagaagcattacaagctgcaattgagaaaaacgagcttgaagaaattcgtgcgaaaaaagatgctttacaagaaatcgtacaacaattaactgttaaattatacgagcaggctcaagcagctgctggtcaagcagaaggtgcgcaaggtgcacaagatgctggcgcaaagaaagacaatgtagttgacgctgagtttgaagaagtaaaagaagacaagtaattcaattgtaaacataataagtaagatgacaaaaagtcaaagtcaagcgtgccttgactttggcttttttcacgaatgagaagcgatgtgtgaggatcttaagtttttcgctttgcatactgtaagtgaggaaactttgttgcaaagcactttctttcggtgttaaaattacgtttatgtgaaagattcgggggttgtaaatttatgagtaaacgagactattatgaggtccttggacttagcaagggcgcttcaacagatgaaattaaaaaagcgtatcgtcgtttggctaaaaaataccatccagacgtaagcaaagaagaaaatgcaattgaaaagtttaaagaagtacaagaagcatacgaagtgttaagtgatgatcaaaagcgtgcacagtacgatcaatttggtcatgctggtgcaaatcaaggattcggtggatttggcggcggaggagacttcggcggtggcttcggttttgaagatatatttagttctttctttggcggtggcggcggcagacgtcgtgatccaaatgctccgcgccaaggtgctgacttacaatatcaagtcactttagattttgaagaagctatttttggtaaggaattaaatgtggaaattccagtagaagatccatgtgatacttgtaaaggtagtggagcaaaaccaggaacttcaaaagaaacatgtaaacattgttcaggctctggtcaagtgagtgtagaacaaaacacaccgtttggtcgtatcgtaaatcgtcaagcttgtggtcattgttcaggaactggacaaattattaaagaaaaatgtacgacatgtcacggttcaggtaaagttcgtaaacgtaaaaaaatcaatgttaaaattccagcgggtatcgataatggtcaacaaattcgtgtgtctggaaaaggtgaagccggcgtaaatggcggaccagcaggagacttatatgttgtcgttcatgtaagaagtcatgaattcttcgagcgtgaaggagatcacattatttgcgaaatgccattaacatttgcgcaaatggcgcttggtgatgaagtggaagttcctactgttcatggtaaagtgaagctgaagattccagcaggaacacaaactggaacagaattccgcttaaaaggaaaaggtgctccgaacgtacgtggatacggccaaggagatcaatatgtagtcgttcgtgttgttgtaccgacgaaattgacttcgcagcaaaaagatttattacgtgaatttgcaggacaagaagagcaggatgatagtttattcggaaagcttaaacgtgctttcaaaggggaataatggaaataaaaaatggagttggtaaattgtgaaatggtcagaaattagtattcttacaacagaagaagcagtagaagctgtctctcatattttacatgaagctggtgctagtggagttgcgattgaggatccagcggagttaacgaaagagcgcgagcaacaatatggtgaaatttatgcattgaacccagatgaatatccggcggaaggtgtattaataaaagcgtatttcccgcaaacggattctttacatgaaacgattgcaggtgtaaaatcatctattgatgtgcttccatcttacgacatcgaaattggtactggaaatattaccgttaacgaagtcaatgaagaagattgggctactgcttggaaaaaatattaccatccagtacaaatttctgatacattcacaatcgtaccgacttgggaagaatatacaccatcttctcctgatgaaaaaatcattgaattagacccgggtatggcgtttggtacaggaactcatccaacaacaacgatgtgtatccgtgctttagaaaaaacagtacagccaggtgacactattattgatgtaggaacaggttctggtgtacttagtattgcggctgcaaaattaggtgcgtcttctgttcaagcatatgatttagatccggttgcggttgaaagtgcagaaatgaatgtacgtttaaataaaacagatgatatcgtgtctgttggacaaaatagtcttttagaaggcattgaaggtcctgttgatttaatcgtagctaacttattagcagaaattattctattattccctgaagatgcagcaagagttgtgaagtcaggtggattatttattacatcgggcattattgctgcgaaggaaaaagtaatttctgaggcgttagaacaagctggatttacaattgaagaagtgttacgaatggaagattgggtagcaattattgcacgaaatgcgtaatatagattttagtctataatgaaaagggggagtctctcactataaggtgagagacttgccgtttgttatatgaaaaatgataacgtttcgttcttttcgtaagtgttgacttacgaaaggaacgaaactctactaaggtgattatatgcaacgttattttgtagaagagaaatatgtaaatgagacaagtattcgcattgtaggtgatgacgtacatcatatcgcaagagtgatgcgtatgtcagctggtgatcatatttattgctgtgtaaacggaaaaacagcagtatgttcaattgatgaaattaccagtgaatttattaatacggctattgtagaatgggtagaggcgtcaagtgaacttcctgttttcgtgacgattgcaagtggactgccaaaaggagacaagctagagttaatttttcaaaaaggaactgagcttggggcagctgcattcttaccatttcaagcatctcgctctatcgtaaaatgggatgcgaaaaaagctgataaaaaagttgagcgtttaagaaaaattgtgaaagaagctgcggaacaatcacatagaagtgaaattccagaagtacatgctccggcatcatttaagcaattgctttcaatgagtggtgagtatgatgtttgtcttgttgcttacgaagaggaagcaaaacaaggtgagaaatctaattttgcgaaagctttaacgacaatgaaaccaggtcaaaagctattgattgtatttggcccagaaggcggtttagctgaggaagagattacagcgcttcgtgaacataaatttgtaccatgtagtttaggaccaagaattttaagaacagaaacggcgccgttatacgcgttaagtgctgcttcgtatcattttgaattgatggggtgatgatcaatgtcaactgttgcgttccatacgttaggttgtaaagtaaaccactatgaaacagaagccatttggcaattgtttaaacaaggtggttatgaaagaacagaatatgaaaagaaagctgatgtatatgttattaacacatgtacagtaacgaatactggggacaaaaaaagccgtcaagtaatcagacgtgctgtgcgtcaaaatccagatgcagttatttgcgtaacgggatgttatgcacaaacatctccagctgaaattatggcgattccgggtgtagatattgtagttggtacacaggatcgtgaaaagatgttaggttacatcgaagaattccgtaaagagcgtcaaccaattaatgctgtccgtaatattatgaaaacacgtgtgtatgaagaacttgatgtaccttatttcacggatcgtacacgtgcgtctttaaaaatacaagagggttgcaataacttctgtacattctgtatcattccttgggcgcgtggtttaatgcgttctcgtgatggaaaagaagttattaaacaagcacaacaattagtggatgcaggctataaagaaatcgtattaacgggtattcatacaggtggatacggcgaagacataaaagattataacttagctggattacttcgtgatatggaagcggaagtagggggattaaaacgtcttcgtatttcttctattgaagcgagtcaaatttcagatgaagtaattgaagtgttagataaatctgaagtagttgtacgccacttgcatattccgttgcaatctggttctaatactgtattaaaacgtatgcgtcgtaaatatacgatggagttcttccaagagcgtttagatcgtttgaaagaagcgttaccaggccttgcgattacatctgacgtaatcgttggtttcccaggtgaaacagaagaagaattcatggaaacatacaatttcattaaagagaaccgcttctctgagttacatgtgttcccttactcaaaacgtacaggaacacctgcagcacgcatggaagatcaagttcctgaagatgtgaagaatgatcgtgttcatcgtttaattgagctatctaatcaattagcgaaagaatatgcatcagcgtttgaaggtgaagtgcttgaaatcattccagaagagcaatttaaagacggcgaccgtgaagggttatatgtagggtatacagataactacttgaaaattgtatttgaaggatcagaagaattaattggtaagctagtgaaagtgaaaattacgaaagctggttatccatataacgaagcgcaatttgttcgtgttcttgaagatgatgtaaaaaaagaatcagctagcgcataaaaagagcgtgcaaccggaaacggtttgcatgctttctttatttgaagcggttaagtactataaggtggggaggcgtttcatgcatccctgtatgaaaaaagatgaaatgataaaaatatagttgtcttcatcagtaaaggatactagctatttgcataacttttgaaaaggaaatgcttctattcttcttttattctgccaaatagttgacctgaagtgataaaatgtattataatcgtaaaagacatgctgaagaagtgtttctttttgcatgctgaagttagtatgtaagtgtgatgtttcggagggagggaaagagaatgtcaaaaacagtcgttcgtaaaaacgagtctttggaggatgcacttcgccgttttaaaagatcggtttctaaaactggtacacttgctgaagcaagaaagcgcgagttttatgaaaaaccaagtgtaaaacgtaagaagaaatctgaagcggcaagaaagcgtaaattctaagagagggtgtaagttatgagtcttctcggtcgtttaaacgatgatatgaaacaagcgatgaagaataaacaaaaagaaaaattaaccgttattcgtatggttaaggctgctttacaaaatgaaggtattaaactgcaacatactcttactgaagaagaggaaataacagttttagctcgtgaagtaaaacagtataaggactccctccttgaatttaaaaaagctggtcgtgaagaccttgttaataaactgcaaagtgaaattcagattttaagcgcatatttgccagagcaattaactgaagaagaactagttgatgtaatcaagcaagttatttctgaagttggtgcgacttctaaagcagatatgggtaaggtgatgactgctgttatgccgaaagtaaaaggtaaaacagacggatcacttgtgaataagctggttatccagctattagcgtaaaaaaacgtctcatttcgtatgagacgtttttttattgttcttattaaggagaaacgctatattgcttaaaaagggtttctataagtgatagaaacccctctagttaaagtttcaatttattatttccttgtataattccgattctacacctattcttacttccttgactaaaacttctttcgcaaataaaagctaagtaccgaaccttctgaaaatcagattgaagttttatagcttgctcttcagcataatcctcaaaggtaacgaaagagattctaactattttagattttgcatcagttgcataaaatggccggatattactgtcgataatttgttttataacattcgaaatttcttgactaaagccaatttactttcgtatttcctcatttattaattcattttttaatgaaccctaatattttttgaaattcatataacaaccatctataaaatattcttacttacaacgtaacattcagagtggagaaattttctttttttttgattttatccctcattaacgggcagcccgattggtgaggggggattaaagtttcactttatctcatttgtccaataaatgacaactacttattctatggtcagtatgtcacatccagaacgaattgtaacagtttttttcaagtttctaacttctcgctaggctcaatttcttaatgtaacttgtactgatatcctgtaggggcgcatattcttgtattaatacttctattattaaaggtaacatcctctgatccatcattgtcctgacaaatatgatttcatatagcgactgttttaattaacatgatatgaactcttacagaatatagttatgttagtgaagtcgttataacacgataggcacttgtgaagaaatacatatatatgggatgagagggggtctttcgagatgaagaaattagaacaaatgaaaaattggttgacaaaacaagtagacctaccagtggatgtattaatggatctacctcggattactcttgttgggcaaatacatatttatatagaaaatcatcgggggttattagtgttttcagataaagaagtgcgattacttttaaaacacggtcaattattaattaaaggacaatcctttgttattaaaacgattcttccagaagagcttttgctcgaagggataattgagcaagtaacatttttagaaaatgaaaaaaaaggtgattgaagtgaaacttccatttgtgaagtttttcttctttatcctgtaaaagttccgttgatagagactgattacagttttactcggtttcattttagtacgagctattttaatgtttcaaataaaaagtagtatatctacttttagaaaggtagtgaaggtggtaaatgaaaaataaatggtttataaagtggcttggatatgtaaaagtgcgaattgaaggtagaggagcggaacggtttgttaatgaatgtgtacggaggaatttattagtttgggatgttaaaaagatagctgatgaaacgttagttttttgtatgttgttacgcgatgtgaaaaaaataaaaccaatttatagaaaaaatgaatgtaaattatattttattggacgttatggttttcctttttggaataagcgtttaattaaaaatagtggatttttaattggttttttaattttcttttttggtgtgattgcaatgtcaaatatggtttggaaaattgaaattacaggagcaaaacctgaaacggaatatatattgatgaaagaattggataaaatgggtattaaaaaagggaaactacaatttcaaatgccgaatgtagaagatgtacaacgccatttgacagataatattaatgccattacttgggcgggactagaagtaagaggaacgacgtatcattttaaaattgttgaaaaaaacgaaccgaagaaagaaaaggaacaaaggccgcaaaatttagtagcaaaaaaagaagcgattattacaaagacgttcgtagaagttggaaagccggttgtactgaaaaatgatcatgtagaaaaagggcagattctcgtatcaggaatatatggtaatgaggaaagtccgacgattgtttcagcgaaaggtattgtgtatggagaaacgtggtatacatctaaggtggatgtcccgttaaagacgcaattccaagtgtatactggtaatgtatacaatgaacattttcttaaatttggggatacgaaaataaaaatatggggatttcagcatgataagtataaacgctctcgtactgaaagtgtaaaacatgatgtgaaattatttggttttacactgccgattgcatatgaaaaagatgttgtgagagaagaggaagaagcgaatcgagaatatacagaaaagcaagcgctgaaagtagcgaaagagatggccgaaaaagaactaaagaaaaaattggatgaacatgctatgattgtaagtgataagattttgagtaaagaggttgaggcgggtcaactaaaggtcacattgcattatactgtggttgaaaatattgcagagccacaaccaatatccgaatccgatattcaaggagactgagtaatggcagaacaattagtagaaatgaaccaaaaattggaaaatactaacgaagcaatcgctctttttggagtcaatgatgcacatttaaaagtaattgaacgagaactgaatgtatcgatcgtaactagaggagaaactgttcatgtatctggggcagttgaaacggtgacactcgtagaaaaaatcttacagcaattacttgttgtaattcgtaaaagtatatcaatttcagagagagatgttgcgtatgcaattcagcttgcacaacaagggaaaattgctcaatttgaagagttatatgaagaagaaattttcaagactgcaaaaggtaaatccattcgtgtaaaaacaatggggcaaagacgatatattcatgcgatgaagaagaatgatattgtctttgggatagggcctgcaggaactggaaaaacatacttagctgtagtaatggctgtgagggctttaaaacaagggtatgtaaagaaaattattttaacaagacctgctgtagaagctggagaaaatttaggttttttaccaggggatttgaaagagaaggtagatccatacttacgcccattatatgatgccttacatgatattcttggacaagaatatacgcagcgtatgatggagcgaggagtaattgaaatcgcgccgcttgcttatatgagggggcgtacgcttgatgattcatttgttattttagatgaggctcaaaatacaacgggtgctcaaataaaaatgtttttaacaagattaggttttagttctaaaatggttattacaggggatccttcacaagtagacttgccaaaaggggtaaaatcaggactatctatagctgctaatattttatctgatgtatcaggtctgtcatttattacattagaacaaacggacgttgtgagacatccattggtgcaacgtattattgaggcatatgataaaatggaatgatcctatttgtcaggatcatttctttttgtatgataaggttggcgaacgtcatattttttactatcatgaaagataaggaaaataaactataggtactagtgtataaaatgttgcctcaaagtatcgtttggtagaagaaatgaaagctataaatagtttcactttatttctggagaggagaaggtattgaaatcatgtcaagatctcaagaaatttctaagtggtttcgtaatttacaacattcgaaaaaactaagttggatttcttacgttgtattaggagcagtgctgttttttgcgcttatgaataatgtaaaaccagagcaattagatgttaatatgtattctattgcgaaaaagacaatccattctcctataaaaattgaagataaagttacaacggataaaaagaaaaaagaagccgctacaaaagttgaagatcaatatacatataaaagtgagtataaacaaaacaaagttgatattgtgaatgacgtttttgctaaagtggatgaagtggtgcaagagattaaagctgttggaccggatgatcaaaaaaagatgactgatgctgagaaagtggagaagttaaaaaagaaactacccgctgacttaacgaaagaattatctgattcaaacttactaagtttgattaatgcagattcgagccaattagtattagcgaaagatgctgcggtcacagcgattaatagtatcatgactgagcatattaaaatggacgaattgaaagatgcgaaagaacgatatgtaagtgagatgaatagtgttaatgttgataatggtttaaaagagtcaattaaggcgctaggaagatatgcaatttcagcaaactatttttatgacccgatcttaacgaaagagaaaagaaaagcagaggaagatttagttccacctgtttatattcttcaaggacaagttcttgttagagaaggtgaaacaatttcaagtgatgtgtataatcagttgaaattagttggtttgttagaaaaagggaacggctttcaaccttatgttggattagcggtactcattggtgtgttactatactttatgcataaacaatttgaattatttttaaagagaaaaagagaagatagaccgtatgttttagcgtatattacaattttgtctatcacaatcgtcttaatgaaaatcattagtttgtttcaaaaacttgaatacgcggggattgcatatgttgtcccagttgcgatgggaacaatacttgtaaaactaatgattggtgatcgatttgtctttttaacgagtatgattttttctgtatgcggaagtattatgtttaatgaaggagtaacgagtacattaaattatagtgtagggatttacgtattgttaagttcattatcggttagtattttcttgcgagaaaaaaatcgtcgtacaatgattttacaagctggtatactcgtttctgtattaaatgtagtcgtattggcggcgctcttattattacgtaatgggaatttttcgcctcttgaaattggtacgcaattattaatggcttcactttcagggattatatcatccgttttggctatggggattttaccatatttagaaagtggacttggaatcgtatcaagcatgaagcttatggaactatcaagtccaaatcatccgcttttacgcagaattttgttagaagcgccagggacatatcatcatagtgtaatggtagcgaatctttctgaggctgcttgtgaagcagtcggggcaaatggtgtattagcgcgtgtaggggcatattatcatgatgtaggaaaaacagtacaaccgcaattttttattgaaaaccaaatgggaattgaaaacccgcatgataaattagatcctgtaacgagtaaagatattataattgctcacgtaacggatggagtaagaatgctcgaagaatatcatattccacaagaaattattgatatcgctgggcaacatcacggtacaacgttactgaaatatttttattataaagctattaaagaagataaagaaaaatatacagaagagatgttccgttatccaggttcaaaagcaacttcgaaagaatcggcaattgttggtattgctgatagtgtagaagctgcggtacgttctatgaatcacccaacgccagaacaaattaataatttggtgcaaagtattattaaagatcgactacaagacggtcaatttagtgaatgtgatttgacgtttaaggaactacaaatcgttggaaaaacgttgtgtgaaacgttaaatggtattttccattcgcgtattacatatccggaacttccggaagaaaaggagaaagaatgagtttgttaattgattttattgatgaaacagaagaagtaaaagaagcgtatatgagtttaattcgtgaagtgttagaaaaagcagctcaaatggaaaatatcgaggatggtgcggaggtatcggtgacatttgtagataatgagcgcattagagaaattaatcgtgattaccgagataaagatcaacctacagatgtaatatcctttgcgatggaagaaatgggagaaggagaaatggagattgttggtgcagagatgccacgcatgttaggtgatcttattatctctattccaagggcgaaagagcaagctgaagagtacggacattctttcgatcgtgaacttggatttttggcattacatggctttttacatttacttggttatgatcacatgacagaagaagatgaaaaagaaatgttcggaagacaaaaagaaattttagaagcttttggattaggacgatgaaaaaaggaaaacttatagatagttttggatatgctatagctggtatattcttttgttttcgtcatgagcgaaatatgaaaatccattatttagccgcagtcattgttatatgctgcggcttttatttccatattacgagaacagagtggatgatattacttattgtaatagggagtgtaatgagtttagaaatggtaaatacggctgtggaaaaaacagtagatttagcgactgccgatattcatccatttgcaaaaattgcaaaggatgttgcggcaggagcggttttattgtttgcaattatagctgttataattggtgctattatctttttaccgtatatggtatagttgcattccgaagcttttattaagctttggaagtgccgtaaggggctttaatgagagagtgtacctcttcatagctgtgaacaggaaggatgcgggaatatgaatagtaaacaattaattctagaagcaatcgaagcgcgtaaacaagcgtacgtaccatattctaaatttcaagtaggtgcagcactattaacgcgcgatggaaaagtatatcgtggatgtaatgttgagaatgcatcatatggcttatgtaattgtgctgaaagaacagctttatttaaggcggtttctgaaggagataaagaatttgtagccattgcggttgtagcagatacaaagcgcccagtacctccttgtggagcatgtcgacaagttatggtagaattatgtaaacaggatacgaaagtatacttaacaaatttacatggtgacgttcaagagacgacagtcggagaattgttaccaggagcatttttagcggaggatttacatgaatagaaaaggttataaatcaggttttgtctctattattggcagaccgaatgttgggaaatctacatttttaaatcgtattatcggccagaaaattgctattatgagtgataagccacaaacgactcgtaataaaattcaaggtgtatatacagaaaatgatgcacaagttattttcattgatacaccaggaatacataaacctaaacataaactaggcgacttcatggtgaagatggcgcaaacgacattaaaagaagttgatatcgttctgtttatggttaatgctgtcgaaggctttggtcgtggtgaagaattcatcatcgagaagttaaaagaaacgaaacaaccagtatttttagtaattaataaaattgaccaacttcatccagagcaattactagagttaattgatcaatatcgtaaactacatgagtttgcagagattgtaccaatttctgcgttagacggtaataatgtggacgctttaattggaacaattaaaaagtatttaccagaaggaccacaatactatccagataatcaagtaacggatcatccggagagatttattattgcagagcttattcgtgagaaagtactacatttaacacgtgaagaagtgccgcattctgtggctgttgttatcgatgcgattcaaaagcgtgagggcggggcagtttatataaatgcaacgattgttgttgaacgtgcatcacaaaaaggaatcatcatcggaaaacaagggaaaatgttaaaagaagttggtaagcgagctcgttttgatattgaagcgctacttggttctaaagtatttttagaagtatgggtaaaagtgcaaaaagattggcgtaataaaatgtctcagcttcgtgacctaggtttccgcgaggatgagtactaaaatagagtcaagctgtaatcagtggatggttggttcatccactgattattggtttttatgaactttgataaattaggaaaaatttttctcacatgaaaatggacaaaatgggtcaatttaataacaacaaaggaaattggtttataggctacgcttattgagaaaggtggattcttatgctagattttacctggaagtttttctccaaaacaggaagcattgaaacgtacttgcttttgaaagaaatggaaaaagacgtaaacgatgagatggatcaacatgaagaggagctagcgcatctagactctccaatttcttgacccgttttgttcaaaccttggatggtgacgaacatgtttcaaaaagttgagggcatcgttatccgtacgacagattacggagaaacgaacaagattgttacaatattctcaagagaacttggtaaggtaagtgcaatggcaagaggggcaaaaaaaccgaaaagccgattagcatctgtgtcgcaattaatgacacatggccagtttcttattcaaatgggatctgggcttggaacattgcaacaaggcgagattatttcaactatgaaagaaattcgcgaggatatatttttaactgcttatgcatcatttattgttgaattaactgataaagcaacagaagataaaaaacataatccgtatttatttgaaatgttatatcaaacgttgcattatatgtgtgagggtgttgatccagaagtattatcattaatttatcaaacgaaaatgcttccggtattagggatgcgcccgtactttgatacatgtgcgatttgtcatcaagaaacagactttgtcgccttctccgttagggaaggcggttttctgtgctcacgtcatgcggagcaagacccgtatcgtataccggtaggagaagctgttcataaattattacgtcttttcttccatttcgatttacataggctcggaaatgtatcggtaaaggatagcacaaaaaaacaaatgcgtttagtattgaatacatattatgatgaatattgcggaatttatttgaaatcaagacgttttttagaacaacttgataagtttcaaatataattttgggccgtatacggtcctttttacatactttctttttcgaatagcatatttagtatataatatttaagagatagtataacttttttcgttgtgcattaaaggtggtgattatcatagagctgaataaacggcaagaacatatcattcagattgtaaaagatcacggtcctattacaggggaatcaattgcagcgcaattgggtctaacacgtgcgacgctaagaccagacttagcaattttaacgatggctggttatttagaagcacgtccacgcgtaggttatttttatacgggtaaaactggggggcagctattatctgaagctgttaagaaaattaaagtacaagattatcaatctagaccggttgtaattgataaaaatgtttccgtatacgatgcaatttgtacgatgtttttagaggacgttggtacattgttcgttgtagatcagatgactctattagttggtgttgtgtctcgtaaagatttattaagagcgagcttaggaaagcaggatttaacctctcttccggttaatattatcatgacaaggatgccaaacattgcgatgtgtcgtagagaggattctttatatgatattgcgatggaattaatagaaagacagattgatgcaatgccagttgtaaaagatacgaaacaaggtttagaagtgattgggcgaattacaaaaacaaatattacacgtgcgtttgtaaatttagtaaataacgaataagtgtaatttgtttaaagtgaggtaatgtaatggataataaaatcgtatatgtcgtatctgactctgtaggagaaacggctgatttggttgttcgagcagcaatggggcaattcccgtttgctcctgatattagacgtgtaccgtatgtagaagatacagggacattaaaagaagtgatttcgattgctaagagtaatcaagcacttatatgttttacgttagttaagcctgatatgcgcaaatatttagtaacagaggctgcaaaagaaggggtagaggcatacgatattatcggccctcttattgatcaaattgaagaaattacggggcaagtgccgagatatgaaccaggcgttgtccgtaggttagatgaagaatactttaaaaagattgaagcgattgagtttgctgtgaagtatgatgacggcagagatgcacgaggtattttaaaagcggatatcgtgttgattggtgtttcgcgtacatcaaaaacaccactttcccaatatttagctcataataaacgcttgaaagttgcgaatgtaccactcgtgccagaagttgacccacctgaagaactatatcaagtggcaaaagaaaaatgtttcggtttgaaaattacgccagataagttaaatcatattcgaaaagaacgattaaaatcacttggattaagtgatggagcaacatatgcaaatattaatcgtattcaagaagaaattgatcactttgaggaagtaattagtaaaataaattgtcaagtaatcgatgtatcgaataaagcaattgaagaaacagcaaatattattgtgaatgcagtgcaaaaccaaaaaatgttttagcacatttaccaaaggtgaatgtgcttttttcgctcgtgtgaaatatggtacctatggattttgtaatagattgtagtgtaatggttatacttatactcctttgtcttttagtatattcaaggtgtgagtttgtcatcctgaaatgtaagatgaaaaaataaagggatatgtagcgtagttgaagaaaatatattataataaaaaattgtgataaaaacctatattttacgtttagactttaatttttcagaataaactagggataggatttacgaaaaagacatgtaattacgttaaatcgacaaaatctatacaagaaaacgcacattatggaaggattcacagaagggatgtagaatacagaaatatgcaaagcatcaacaacatattagttggtgtagatgtatatcccgtgaaggctgaaattgtgcaagttggagcggaatttcatgtcggaattttgtttgtcgcatcatatgctcatcctttaaggaaatagcaaggcaattggatctttgtagatactgaacaaaatggagttgatcgttatatggatcaacatgaaaaagttacaaatctcaagatcaaacagtatatgtggcttgctactcttcttataaaaaggtgtgtatgtattgtttctaagagatacatttgtaacagatgagcaaatgtatacaattttatatagcaagtatgtatatgcgatttatgcagataaaggacctataggaaaggttcaaaatcgtttatacaatgtaatcggcaacactttctaacaagtttagaaaaatattgtcgaattataaaggaattttttaatttatatcgaatacaaaatacgacacggagatggagttatggggaacagaattcccgaagaagttgttgaacagattcggacatcatccgatattgtagaagtcattggtgaatacgttcaacttagaaaacaggggcgtaactatttcggcctttgtccatttcatggtgagaattctccttcattctctgtttcatctgataagcaaatttttcattgcttcggatgtggagaaggtggaaatgtattttcctttctaatgaaaatggaaggactggcttttaccgaggctgttcaaaagctaggcgaaagaaatggaattgcggttgcagagtatacatcagggcaaggacaacaagaagacatatctgatgacactgtcatcatgcaacaagctcatgaattattgaaaaagtattatcatcatttattagtaaatacggaagagggaaatgaagcactttcatatttattaaaccgtggtattacgaaagagatgattgagaagtttgaaattggttatgcatcacctgcttgggatgcagcgacgaaaattttacaaaaaagaggtttatcgctgtctagtatggaacaagctggccttctaataagaagtgagaaggatggtagtcattatgatcgcttccgtggaagagttatgttcccgatctatacgttacaaggtaaggtgatagcgtttagtggaagggcgttaggagatgacactccgaaatatttaaatagccctgaaacaccgatttttcacaaaagtaaattgttgtataacttccaccaagcaagaccgtttattagaaagcgtgggcaagtggttcttttcgaaggatatgccgatgtactagctgcggtaaaaagtggtgtggaagaagctgttgcgacaatgggaacagctttaactgaagaacaagcaaaacttctgcgacgtaacgttgaaactgttgttctttgctatgatggtgataaagcagggcgagaagcgacgatgaaagcagggcaattattgctaaaagttggttgccaagtgaaagtcacatccttgccagataagcttgatcctgatgaatatgtgcaacaatatgggactactgcttttgaaaatcttgtgaaatcaagtgtgagttttgttggttttaaaataaattatttgcgtttagggaaaaatttgcaagatgagtctggcaaagaagaatatgtgaagagtgttttaaaagagttatcgttgttacaagatgcgatgcaggcagagtcatatttgaagtcattatcgcaagaattttcgtattcaatggaaacacttttgaaccaattgcaccaatatcgcaaagaacaaaaggtacagcaaaaacaaataaagcaggttgctaaaacgtctcaagtcgttcaaacaaaaccgaagttaacaggttttgaaagagcggaaagagaaattatttaccatatgttgcaaagtgcagaagtagctgttcgtatggaatcccatatagaagattttcatacagaagaacataaagggattttatatgaactatacgcatattatgaaaagggaaatgaaccttcagttggaacatttttaagttggctctctgatgaaaagttgaaaaatattatcactgatatttcgacggatgaatttattaatccagaatacacagaagaagtgttgcaaggccatttggagacgcttagacggcatcaggaaaaacttgaaaagatggaaattatctttaaagtgaaacaaatggaaaaaacagatcctgtagaggctgctaaatattatgtagcatatttacaaaatcaaaaagcgagaaaatagcttttttgataaagttttagtataatgaatgtttgtatctcgcgtaaggaggggaacagatggctgacaaaccagctcgttctaaacaaattgaaactgaaatgacccttgagcaagtgaaagaacaactcactgagctcggaaaaaaacgtggcgttcttacatatgaagagattgcagaacgcatgaatggatttgaaattgaatccgatcaaatggatgaatactatgaatatttaggtgaacaaggcattgatttagttggtgataatgacaacgaagaaggccctaataatcgccaaattacaaaaacagaagaagagtttgacctcaatgatttaagtgtaccacctggggttaaaatcaacgatcctgttcgtatgtatttaaaagaaattggtcgtgtagacttactatctgcagaagaagaaattcgacttgcaacgcgtattgaagaaggcgatgaagaagcgaaacgtcgtcttgcagaagcaaacttacgtcttgtagtaagtattgcaaagcgctatgtaggccgtggtatgcttttcttagacttaattcaagaaggtaatatgggtctaattaaagctgttgaaaagttcgattatcgtaaaggtttcaaatttagtacgtatgcaacttggtggattcgccaagctattacacgtgccattgcagaccaagcgcgaacaattcgtattccagttcatatggttgaaacaattaataagttaattcgtgtacaacgtcaattattacaagatttaggtcgcgaaccatctcctgaagagattggtgaggaaatggatcttgctccagaaaaagtacgtgaaatcttaaaaattgcacaggagccagtttctcttgaaacaccaattggtgaagaagatgactcccatttaggtgactttattgaagaccaagaagcaacatcgcctgcggaccatgcagcctatgaattgctaaaagaacaattagaagatgtgttagatacactaacagatcgtgaagaaaatgttctacgtcttcgtttcggtttagatgatggacgaactcgtacgcttgaagaagttgggaaagtattcggcgtaacgagagagcgtattcgtcaaattgaagcaaaagcacttcgcaaattaagacatccaagccgtagtaagcgtcttaaggatttcttagaataggttattttttaagtttacttcacttttgtgaagtaaacttttttattttgttaatttttgttaaaatttagctatgggcaacgattacaatttcttgtaatttattttacagaattgtcttttgatttgcaaatgctcatttttcgatttttcgattaattttgtttattatatacaaaaatatatgtagaaaagcgaaaaatatgatgagaaacgttaataattatcgaaataataagcgatatgacaataaaaaacaataaactgaatttatggaatatttttaacaagtggtagtttgctcttttctgatagagcgttttcaagtacaatataaatgactgaatcatctaactatttaggggtatagaggggggagaagagatatgaaacgtaatccgctgattccgttcgctcttattgcagcattgggtattatcgttatgtttgtattttcatttcaggggctaaataaatctaaagagttagctgatgcaaaaaatggcgggaagccagcacaaacggcatcaaaaccagaagatattgtgaagcaaagctgtacgagctgccatggtgatcagttacaaggggcagttggacctaacttacaaaaaattggtgggaaactttcaaaggatgaaattaaagaaattctttcgaaaggaaaaggcaatatgcctgccaatatagttccagctgatcaagccgctaaagtagctgattggttatcgaagaaaaaataaagttccgtatgacaagccttttgcttatgcaaagggcttgtttttctatattttctaaaatacgatgaatgatagagcggtgaattgttgttatgggcttgcaacaactactgtaaattcattatcatggagacagactgacaagagaaggagtaatggaaatacatgaatgaagtaaagctttcaaaacgattagaagaagttgtacgtgaaataccagtaggatctacagttgctgatattggatcggatcatgcgtatttaccgtgttatacaattataaataatattgctacaaaagcagttgcaggagaggttgtagatggaccatttcgctctgcgcaagcaactgtagctgaaagtggtttacaagataaagtagatgtgcgtaaagggaatggattagctgttatcgcaccaggagaagtagatgtaattacggttgccggaatgggcggagcgttaattcgtgacattttagaaagtggtaaagaaaaattagaaggtgtaacacgtttaattttacagccgaatattgcagcgcatcatattcgtgaatggtttattgagaatggttgggagcttatccatgaaaaaatcgtaaaagaagatgggaaaatttacgaaattttagtaggggagcgcggaaatgttgtagcgccttactctgaaaataaacaagctgaattgtttatgggaccatttttaataacagaaaaaagtgaagccttcgttgaaaaatgggaaggagaattaaaaaacttccaaaatattttaaaacagttagaacgtgcggctgattctgaagaaacaaaagcgaagcgtggggaagtagaagcgaaaatgaaaatgataggggaggttttatcatgagtaaaattccaaacggccatgaaattatttctttatttgaaagtatgtatccgaagcatttggcaatggaaggagataagattggtctgcagattggagcgcttaataaacccgtgcagcacgtattgattgcgctagatgtaacggaagaagttgtggatgaagcaattcaattaggggcaaatgtcattattgctcatcatcctttaatttttaacccgttaaaagcgattcatacagataaggtgtatgggaaaattattgaaaagtgtattaaaaatgatattgcaatctatgcagcgcatacaaatgtggatgttgctaagggcggggtaaacgatttacttgctgaggcgttaggattgcaaaatacagaagttttggcaccgacatatgcagaagaaatgaaaaaagttgttgtgtttgtgccagtcactcatgcagaagaagtaaggaaagcattaggagacgcaggtgctggtcatatcggcaattatagccactgtacgtttagtagcgagggtacaggcacatttgtacctcaagaggggacaaatccttatatcggggaaactggacagttagaacgtgtagaagaagtgcgaatcgaaacgattattccagcttccttacagcggaaagtgattaaagcaatggtaacggcgcacccttatgaagaagtagcgtacgatgtgtatccgcttgataataaaggtgaaacgttaggcctaggaaaaataggatacttacaagaagaaatgacgcttggccaatttgcagaacatgtgaaacaatcattagacgtgaagggcgcaagagttgtcggtaagttagatgataaagtgcgtaaagtagctgtacttggtggagatggtgataaatatataaaccaagcgaaatttaaaggagcagatgtatatgtaactggtgacatgtactatcatgttgctcatgatgcgatgatgctcggtttaaatatagttgacccaggacataatgttgaaaaagtaatgaaacaaggtgtacaaaagcaattacaagaaaaagtggatgcaaagaaactcaatgtacacattcatgcttcgcagttacatacagatccatttatatttgtataagaaaaataaaaaccgttgctcatgtaagcaacggtttttattattgttcttttttcactttcacgcgaggtaatattttttgtaacggtacttttcgaactctttcccatgtagcgggattcattgggtcatattgctctaagaaagcgataacttctttcgtaattggcgttggagtagaagcacctgctgtaacagctacgttttctacaccttgtagccactctaattgaatttcgcttacatcagcaactcgatatgcttttgtacccgcgatttcttgtgatacttgtgctaagcgatttgaattgttacttttcggatcaccaacaacaattgttaagtctgcaacatcagcttgtttagcgacagcttcttggcgaacttgagtagctaaacaaatttctttatggaattctgctgttgggaattttttttgaatgtcctccattaaatgttgaacatcccattgactcatcgttgtttgatttgttactaaaattttatctgttgggatttctaatgtttttaaatcatcggctctttcgataaggtgaacgatgtcaggtgcaataccaactgcgccttctggctctggatgattttttttaccgatataaatgacatgatacccttccgctttcttagcttcgataaggtcatgcgtcttggtaacatctgggcaagtggcatcgattgttgttaaacctttttcttttgcgcgttgtttaacttctggagaaacaccgtgtgctgtgaaaataacagtaccagaatcaattttatctaaaatttctaagcgacttggaccgtctaatgtgatgattccatcttcttcaaaagcgtctgtaacatgtttattgtgaacaatcatacctaaaatataaatgggtctcggcaatgatttatctaatgcagcgttacgtgcaattaccattgcatcgacaacaccgtagcaataaccacgaggggaaattttaacaattttcatatgagtaatcctctccttctaaacaagggatacttttgtgcatagtcttttacattataaaggaggagtggatagaaaacaaaggattgttacacatatagttttggttttgttgctgtttgttgaactggttctttcggtaactctttttctattacaggttcaatcactattttctttcgttttcgtttctttttttgaggtgcaggaggcggactttctacctcaactggctctgttacattttccgtttgattttcttccgtactttttccagaggtgaggattttaacaatgcttggtagactacgcataataggaccatactgttcgacgacaggacctacagattgaacgacttgggatactttttcgatgttgtttatcatattagtaggattcgaaattaagttcgaaaagaaactgccgatgccactgcttgctgttgcggcagctgtagttgcgccgccgcgcgtttcatttgattcatacatttgaggcggtatcatttgctcaggatgttgctgcatgtatggttgatattgtggatgttgctgctgatattgttggtggtattgctgctgatattgctgttgatattgtggcggtggtggttgctgatgcatcatcggttgcccttccatttgtcggtaaggtggaaccatttgcataaaaggctcggttggatcgtgttttttaaaaagcttagcaagaaaacctttctttttttgtgccattggtggtagttgtggaattggatatggtgtataaggttgttgccctggattcggatacatttgccttgtaggggatttcggaaacatgtgagaaatcctcctttcttcagttaggtatatacacatacaatatgcaataaaagggaagaaggttagtttttgaagtgaaaacctaaactaaagatggattttacttgtagatttcgatataatgtagacttgactgatttgtgcgcgcagtagaaattttagaaagaaggtgtaacttatgacacaacaaacttttacacagtatgattttaaaccatttttaatagatgcagttcgtgaactacgctttacagagccgacaggaattcagcagaaaattttcccggtcgtgaaaaaaggtgtaagtgtaattggacaatcccaaacaggttctgggaaaacacatgcatacttacttcctacattaaacagaattaatgcaagtcgtgaagaagtacaacttgttattacagcgcctactcgtgagttagcacaacaaatttacgaagaaatcgtgaaattaacaaagttttgtgcggaagaccaaatgattacagcacgttgtttaattggtggaactgataaacaacgctcaattgaaaagttgaaaaaacaacctcatatcgtagttggaacaccaggacgtattaaagatttagtagaagagcaagcattatttgttcataaagcaaatacgattattgtcgatgaagcagacttaatgcttgatatgggattcattcatgatgtagataaaattgcagcacgcatgcctaaaaacttgcaaatgttagttttctctgcaacaattcctcaaaaactaaaaccgtttctgaagaagtatatggagaatccagagcatattcatatcaatccaaaacaagttgcagctggaaacattgaacactatttagtgccttctaaacatcgtaataaaattgatttagtgcataaaatgctacttcaatttaaaccgtatttagcagttgttttcacgaatacgaaaaagatggcagaccaagttgctgatggattaatggaacgtggcttaaaagttggacgaattcacggggatttatcaccacgtgatcgtaaaaaaatgatgaaacaaattcgtgaccttgaattccaatatattgttgcgactgatttagcagcacgtggtattgatattgaagggattagccatgttattaactatgagctaccatcagatttagatttcttcgttcaccgcgttggaagaacagcacgtgcggggcattctggtattgcagtgacgatatatgatccagcaaacgaagaagcgttagatagtttagaaaaacaacgtcatattgagttcaagcatgtagatttacgcggagatgagtgggccgatttaggtgagcgtcgtcgtcgtaagagccgtaaaaaaccaaatgacgaacttgatgttatggcaacgaaagttattaaaaaaccgaaaaaagtaaaaccaaactataaacgtaaacttgcaacagaacgtgacaaagtgaagaaaaaatatggcaataaaaaaagataaggggtttcccttatcttttttttatcccgctatttgtgggagatgtaatcaatatggatagaaaagtattgattaaagtttcacttaatccagctaatttaaatgaaaagtatagtctgtataaatagtcatataaatttgtgtagtgcatcttttgtgaacaaacaattcactacatatttctacaaattatgctatcattatatctattgtatattgaagaggtgattgtatgttaaagattggatctcatgtttccatgagtggtaagaaaatgttattagcagcaagtgaagaggctgtttcatacggtgcaacaacgtttatgatttatacaggtgcaccgcaaaatacacgaagaaaaccaattgaagaattgaacatagaagcaggaagaaaacatatggagctgaacggaattgaggaaattatcgtccatgcgccgtatattattaatgttgggaatacgacgaagccagaaacattccaattaggcgtagactttcttcgcatggaaattgaaagaacatcggcattaggtgtagcgaaacaaattgttcttcacccaggagcgcacgttggtgctggagcagatgctggtattcaacaaattattaaagggcttaatgaagtattaacgccagaacagacggttaacattgcgttagagacgatggcaggaaaaggaacagaatgcggtcgtagctttgaagaaattgcaaaaattattgatggtgtaaaatataatgaaaagctatctgtatgctttgatacgtgtcatacgcacgatgcaggatatgatattgtaaatgactttgacggcgtattaaacgaatttgataagatcgttggtatagatcgtttacaagtacttcatattaatgatagtaaaaatgtacgcggagcaggaaaagaccgtcatgaaaacattggatttggtcacattgggtataaagcattgcatcacattgtacatcatccacagttaatgcatgtaccaaaaattcttgaaacaccgtatgtaggggaagataaaaaagataagaagccaccatacaaattggaaatcgaaatgctgaaaaacggcacttttgatgaagggcttcttgaaaaaattaaagcgcaataaggagggggaaatcccctccttattttagtagttgctgaaataatgtatttacttgttgggcagtggcaggggaagttacttttgcgatttgttttaagagctctagtcgctcgttgttatcgtaaatattaatatttttacccttcataagtaaaacgatttgatcagcttgtgcggctgtaatgggaacttcatattctttgctatattttaataactcttttgtagaaatatgatttaattttttattaacaatttgtttaatgaggttcatcttattatcctccttcacgcgttcttctatcgaaatatatgagcatatagcttgtacatattcgtatggagtttcttttttcatgaggaaaagaagcgtatgttataatataaggacaaaactacagaaaaagagtaaagggaggacttatggagcaaaagcaacatcgaaaagaaagtgttattcatctcatttatcgtttagttatgattatttttggagcagcatgcgcggcggtagcaattgaactatttttaatgccaaataaaattattgatggtggaattattggtatttctcttatattagattatcttactcctaacatttggtggttaagtttttctactttagtcgttgttctcaatatcccatttatgtattccggttataagcaaattggaaaaacatttatgttatcttcgacatttggtattgtagcattagctttcattgagtcaacgttacatgcggtaccaccatttacaacagaacctattttagcgacagtgtttggtggtcttattttaggtcttggtgtaggacttgtaattcgtcatggtggatcgctagatggaactgaaattatggggattttattaacgaagaaattaccgttctctgttggtgaattcgtaatgtttgtgaacttatttatttttgcatgggcagcatttgtgtttggtgtggaacaagcgatgtattctgttatgacgtactatatcgcatttaaaacgatcgatacagtaattcaagggctagatgaaacgaaggcggttttaattgtatctgatcaatatgaggaagtatcaaacgcgattttgcatcgtcttggccgtggaactacaaagcttgtagcgaaaggtggttacacggataaagaaaaagaagttatttatgcagttgtaacgcgtctagaagtgacgaagttaaaatcaattgtgcatgaaattgatgaaaatgcgtttgttacgattatgagcacgcaagagacaaatggtggtaagtttaaatcggctattcactaaaaagtttataggaatatttttcgaaagcagagaatttttctctgctttttgttataatagtaaggtttcttgaaaaaatagatatattttaggcagattggtttacaactataataagctgtactataattcaaatagatataaatcggaatcattctgaattaaaataggtgagatgctatgaataatatattagaaattgaaggtttaacattccgatacgaagatcggaatgtgttagaaaatattaatttgcaagttccgaagggagcttttttaggtttagtgggaccgaatggttcaggtaaatcaactttacttaagtgtttattaggtgttttaaagccaaaagaaggaagcattcgcgtgtttggcgttgatagtaagaagtttaaggaatggaacaaagttggttatgtatcccaaaaggcaaatagtttcaattctggttttccagcaactgtttctgaagttgtgtcaatgggacttgtttcgaaaaaagggctttttcgctttttcacaaaagaggataagaaaaaggtagaaaaagcaattgctgatgtagggatgagtgagtttcaaggtcgtaacattggagagctttctggtggacagcaacagcgtgtatttattgctcgtgcgctcgttagtgatcctgaattgcttattttggacgagcctactgttggaatcgatgtgaaaaatgtggaaagtttttacgaaatattagaggatttaaacaaaaggctcgggatcacattaattcttgttactcatgatatgggagctgttactgaaaaagtaacacatgttgcatgcctaaaccaacatctacatttccatgggaatgtagagaagttccgagagttagaagatgcagaaatgtccgtcttatatggacatcatgttcatcgtttagaacacgaacatgagcatcacgggaggatataatgatacaagattttttacaatatgactttttacgtaattctttatacgcaggtattttaattggacttgttgcaccgttaattggtgtgtttgttgttattcgtcgtttatctcttattgcggatgcattaagtcacgtgacgttatcgggtattgcagcaagtttattacttgaaaaaaccatttttacaggtgggtttttaaaccccttatatatggggatgattttctcgattggtggagcgctactaatcgaaaagttacgaactgtatataagcactatcaagaattagcaattccaattatcctttcggcagggatgggggttggagttattttcatttcacttgcaaatggatttaacacagacttatttagttatttatttggtagtgtcagtgctgtaacaagtacagatttaattattattgggattgtagcaattgttgttgttgcgacaattattttattatataaagagctgtttctattatcatttgatgaggaatacgcagtatcaactggtttaagagcgaaatggattcactttattttcattatattagttgctcttgtcattgcagtatcaatgcgtgtagtgggggttcttcttgtatcatcattaatgacgttaccagttgcagcaagtattcgtattgctaaaggatttaaacaaacaattttcttttccattttatttggtgaaattgcagtaattggtggaatgtttgcttcgtatcaacttgatctagcgccaggtggtacaattgttatgatagcagttcttattttaatcggtgcgattttatggaagaagaaaaaaactgcataaagtagggataggtatgaatctaacagaagctttacgcctaatgaaagaaaaaggatacaaacatactggaaaaagagaagagatgctcagattatttgcagcacataatcgttatttaactgcgaaagacgttttagagcatatgaaggacgattatccagggcttagttttgatacgatttatcgtaacttaacagtttttgctgagattggtgttttagaacaaacggaattaaatggtgaaaaacattttcgttttacttgttctattatggaacatcatcatcattttatttgtttggattgtgggggaacgaaagagattacttcctgtccaatggattttatgaataaagattttaccggttatgaagtaacggggcataagtttgaaatatatggtcgttgtccaaaatgtgcaaagtaaaagctcgtcggttatataactgacgagcttttttacgtagaaaagaaggttgctcacaaatgttgtggcaaccttctttttattgttcttgtgtctctttttctttttctcgttcagcagccatttcagcagcaattacgtcgatttcttttttcagttcttctaccattgtttcttctggtactttacgaacgacttgccctttacggaataataatccctctccacgtgcaccggcaataccgatatcagcttcacgagcttcaccagggccatttacagcgcaaccaagtactgcaactttaattggtacttgaagtgtagagatgtattcttccacttcgttagcgatgctaattaaatcaatttcaatacgaccacaagttggacaagagataagtgttgctgcgttagacgcaagaccgaatgattttaatagttcacgagcaacttttacttcttcaactggatcagcacttaatgaaatacgtagtgtatttccgatgcctttatttaagattgctccaagaccagcagcactttttacagttccggcaaacaatgttccagattctgtaatacctaaatgtaatggataatcaaaagcacgagcagctttctcgtatgcttcaattgctaagttaacatcagaggctttcatagatacgataatatcgtggaaatctaggtcctctaaaattttaatatgatgtagcgcgctctcaaccataccatctgcagttgggtacccgtacttttctaaaatatgacgctctaatgaaccagcgtttacaccaatacggattggaataccgcgctcttttgctgcatttacaacagcttctactttatggcgacgaccaatgttacctggattgatacgtactttatcaatgccgccttcaattgcttttaaagcaaggcgataatcaaaatgaatatcagcaacaagtggaatgttgatttgtttttttatatcagcaatagcatctgctgcgcgttcatctggaacggcaacgcggacgacttgacagccggcttcttctaaacgcttaatttcagcaactgttgcttcaacatcatgtgtttttgttgttgtcatactttgtataattaattcattattaccgccgattgttaaattaccgactttaactggacgtgtttttgtacgatgagtcatttcattcacgaatagatcgctctccttataaaagaagtttcttatttagtccctcatatcaatgatagtatacgtgatatagggctatagaaaccgaagtactcggtttcacttttactattgtatcagcgcctttatgtaattgacaaggattaagtgatagcttattgatataaggggaatttataagactttccaatttgtatttttgtagcagatgtacttttgtttaattgtttaaagtcgtcaatgactttttctatggaaggaatttttttcttgttaatttgttctgtaatagaaagaactgtctcaccagtttttacttcaattgttttataagatacatccgtttctttttctgttttgttctctttattctgctgactgtctgtgttttcttttttaatcgtttgagcagcagttgtttttttatatgaacttaacatcggtaaagtaccgatttttatatcgtaataaaatatataaccgagaacaagcacgaataggaatatacctaatctcttcatattcttcactcctttgctaggaatatatgcttgtccaaaaaaaaaatgcctatttaggcattttttttcgttcttatttttctttcggttttggaacttctttaatcgttaagtacagaacaattaaaacaactgcgatatagatgaatgttgatccaggtacgacaatcttacatgcatccataatcataaagaagattgttgggattgtgtagctgtatgcagttagtgtccaaacttgtttataggatagtttacgttgaccgctcatagcagaaccgatgaacgcaagtaaagtcacacctacaaaagtgatgaataattggaataggtacactaagaatccaataacaaataataaaattggataaatattatcgaataaagaaataaattcttgtagatcttttttctcaagagatgcacctaacaaatcgttataagaatacgtttgtatttgaccatttcccatagagactactttatcttttaaaacaaataaacctgttttattttgatatttttctaggtctgttgaatttggatcaaatacgaaaagtgcatttccttcttctttttcaataggttgatcaatatcggcttttagttcgccattttcaattttaaaatcaggtaaatctttatcgatgacttgatttaccatgcttacaccatcttggataaaactaccgtacaaaaaagttcttggaatagtagtaattaagcaaagtagcataatatacaaaatggttttaccgattttttgaaaacggaatagcgccatatctttaggcgagtatatgctttttacgaattgggtaaatatggacatagattcacttcctttatgtatgtataaaatcattgtaacgtagtaatctagagaatctcaagatatattatatttacatatagtggagataactaaatttcttttattaactttcttcttttaaataagaaaaatacaattgacacttttcttttctatatggtaaatttatcttacatttcttaaagagcatatccgataggaattcctttatttgatatgttgttacatacataattgtggacccttagctcagctggttagagcagacggctcataaccgtccggtcgtaggttcgagtcctacagggtccatatccatttcacatgtttattatgttagcaggaagcttccttgtagaaggaagctttttttacggaatatatgagcattttaattgaaaagaagtggggattttgctactttaatgatagcaagacaatgtgatttatttgtttgcaccctatggcaattagggtagaatgaagttgtatgtcacttaagtggcaatacataaactgggaggaatataacaatggcaaaacacgaattaccaaatttaccttatgcgtatgatgctttagagcctcactttgacaaagaaacaatgaacatccatcatacaaaacatcacaacacgtacattacaaacttaaacgctgctttagaaggtcatgcagaattagctgacaaaagcgtagaagaattagttgcaaacttaaacgaagtaccagaagcaatccgtacagcagtacgtaacaatggtggcggacatgctaaccatacattcttctggacaatcctatctccaaacggcggaggacaacctgtaggtgaacttgcaactgcaattgaagcaaaattcggtagcttcgatgcattcaaagaagaattcgcaaaagctggcgcaactcgcttcggttctggttgggcttggttagtagtaaacaatggtgagttagaagtaacaagcactccaaaccaagattctcctttaactgaaggtaaaacgccagttatcggtttagatgtttgggagcatgcttactacttaaactaccaaaaccgtcgtccagactacatcggtgcattctggaacgttgtagattggaacgctgctgaaaaacgttaccaagaagcaaaataattgtaacaaatatagaaaaagctaggggagagcccctagcttttttctatgctttccttttacataattgggcttgtctttggaagactagaacatgaagtaaaggagagttgtgtatgaaatggaaacatataattggtgacgttgaagtgaatcgggatttagtgttattgctccttataggaggtttatacacgctcgcaatttctttatcgaatacgtttgtaaatatttatttatggaaacaaacacaaaattatgtgaatcttggcttgtataatttagccagcgtggtattacagcctctcacatttcttgtaggggggaaattagcgaaacgtatcgatcgctcgattttattacgaataggggtaggaacgctcgcaattttttttatcgttgtcttagtagcagggaaaagtgcttctcagtatattctattaatgggggctcttttaggagtaggatacggtttttactggttggcttttaacttattgacatttgaaattacagaaccagaaacaagagatttctttaatgggtttcttggacttcttacatccttctctgggatgattggaccaatagcagcaggatacacaatttcacgtatggagaaatggagtggctatactgttatattctttctttcattagttctatttgcaattgctgtcgtcttaagcttctttttatctaaaagagaatgtgaagggcgttatgaaatcgtgcaagtattgaaagaacgacggattgataaaaattggggaaagattacacgagctcattttttccaaggattgagagaagggacgtttatttttgtcatttcagtatatgtttatttagcaactaatagtgagttcgcattagggaaatacagtttagtgaactctgctgtatcctttgtatgttattacttagttgctcgtatgttaaagaaggagtggcgaaaaaaagcaattttacttgggggcattattttatatgctgtcgtctttttagttattttcaatgttacatacacgaaattacttatttatgcggcatgtattgcgattgcatatcctattttacttgttccgtacggatcaatgacatatgatgtaattggtagagcgaaaaatgcgagagaatggcgtgtggaatatgtcgttgttcgggagttatggttaaacgccggaagaatctgttccattttaagttttttatgtgctgtactattctttccacctgaaaaaagtttaccttacttattatgtattttaggtgctggacattttcttatttattttgcagttaaaaatgtcaaatatgatgagggaaatgcgagtaaaacaagtgttgtaacgcaagagaacgcgcaaaaccaaactgaaccagaaggttaacttctcgtttgttttatgctagaatagaaaaagatgtaagacagcagtgaggacacctgtatgagggtgtccctttcacattacatagctgttggtagagggggtttgtatgagcaagaagcagaagcaaaataagaaaaagacccacgttccttttcgattaaacgtgttgtttttctgcgtgtttttaatgttctccgcggttattgtaaggctcggatatgtacaaattgttcgcggtgaagaatataagaatgaagtggagaagaaagaaaactcaacgataagtaatcctgtaccgcgtgggaaaatatttgaccgttatgggcgacctgtagtagataatgcagccattcgtactattacatttacaaaaatgaagggatcaactgcagaggatcgcttagaaacagcgaaaaagctagcagatttgattgaagtaccgacagataaattaacagatcgcgataaaaaagattattggcttgctatgcataaagaggaagctaaagaaaaaattacgaataaagatcgtcaagagtttaaagataaaaaaattgatgataaagaattagacgagcgtcagagaagtcgtgtaacagaagaagagattaatcaattatccgccaaagatctagaaatactagcgattaagagtaagatggacggcggatatgcaatgacacctcaagttattaaaaaggatgctacagaaaaggaatattcgattattagtgaaaacctagcagcattaccaggtgtagatacgaatgttgattgggagcgaaaatatacgtacgatgatttattccgaagtgtacttggtggggtgtcgacatctgatgaaggcttaccgagagaaagactagattactatcttgttcgtgattacaatcgaaatgaccgagtaggaaaaagttatcttgaacaacagtatgaagatagcctgcatggtacgaaagcagaagttagaaatgttacagataaaaacggtaatattttagaaacgattaatgtatcaaaaggacaaagtggtaatgacctgaacttaacaattgatatggaattacaaaagcgcgtggaagatattcttgcgaagaatttaatgaggtttaaaggaagtgaacctcttttagatcgcgcatttgttgtaatgatgaacccaaaaaatggtgaagttttatctatggcggggaaacaattagttaacgaagatggtcaaacgaaagtaaatgactttgcattaggtaccatgacaagttcttatccgatggggtcaactgtaaaaggtgcaacagtacttactggatatcaaactggtgcgattcaaccaggggcagtacaattggatgaaccaattaaattaaaaggtacacctacgaagtcgtcttggaaaacgatgggatacattaatgaccttacagctttaaaaatgtcttctaacgtttatatgtttaaaacagcgatgaatatcgccggtgttccatatgtgagaggtggtacgttagatatacctcaaaaagcatttgatacgatgcgttattatttcggacagtttggacttggtgtaaaaacaggaattgatttaccgaatgaatctgctggtcagatgggtaagagtagtcaaccaggtttcttactagatttatcaattggacagtatgatacgtatacaccgcttcaattagcgcaatatatttcgacgattgccaatggcggatatcgtatgcaaccacaagttgtaaaagaaattcgtcaaccggcagtgaaaccagatgaagttgggaaagttgttcaatctatggaaccgaaagtattaaatcgtattgatatgccggaatcgcaaattaaacgcgttcaagaaggatttagacaagtgtataatgattcaggtggtacagctacaaagtactttacaggtgcaaaatataaagctgctgggaaaactggtacagctcaaactgtgtatggtggagataaagagattggtagaaatgcaaaaggtgaacgtgtggaaacatataacttaacattagtaggttatgcgccacttgaagatccagaagtagcattctctgttgtcgttccatgggtacatgatgataagactggtattaatggatatattggtcgtgaaattatggacgcttactttgatttgaaaaacaaagaagtaaatggtgaagctccaaaagatgataaagacaataaaaacaaagatcaagatgatgaataaaaaagttgtaaaaaagcacactatatgaaaagatagtgtgcttttttttatggtttatgcatatcgtgtaataaatgtggacaagtatacaacatttaaaaaacgcggccctataaatgatacttgtatatggtgggataggggataaatattttatagggaaatcatcagaggaaatgaatagctactactgaattaaaattgtatcgtatgttgatttttgtggaactttacaaaacttttacaaacaattaaaaccgaattaatagtttagcagtattcttatatctgtaatcctgttatttccggttacttctaggaggaagaacacgtgaaatggatgcatacaccgattaagattttcgtattatcaatatggttcctctgttttgaaatgtctactgcatttgctttaaatgatacgggagaagtgagagttgatggatcctcaacggtttttcctattatagaagcagtagcggaggaatatacaaaggtgcatccagacgtgaaaatttccatcagtatttctggaactgggggaggatttaatcgtttcagtaaaggagaagtagatataaataatgcttcgagagtaatgaaacaagtcgagaaaaatgaaatgaagaaaaactctattcagttcacaccttttgaggttgctaacgacggtcttacgattgttgtgaatcgccataatacatgggtagacgatatgtcagtagacgagttacgactactttggagtgaaaatggaagagagaagcgatggtcacaaattcattcaacatggccacgtgaacaagtgaagttttatgcaccaggcgtagactctggtacgtatgattattttcaaaatgtcatcttacaaaatcatcgcattgtaaaaaaagtctctttgtctgaagatgatcaagttattatgcaaggggtaatgaatgataaacatgccattgcttttgtaggatatgcttattatatggctaatcgagataaggtgaaagcaataaaagtaaatggtgtatttccgacgaaagagaccattcaatcaggtaagtataagccgttatctaggccgctacttgcttatgtgaataatgcatctatccgaaataaaatgaatgtagcaaactatgttgagtttatgattcagcatgtcggtaacctcgctgaagaggtcgggtatgtaaaattacgaaaagaaaaatacaatgaacagctgcgtatgttaacagaaataaaaaggtaatgtcagggtggaaaggggttttcatctttggctcataatgacaaaagtcaaattacattttctgtacaacatttgattgaaagaaatacaaaacaaagaaaaaaaaagcagcgaatcaatcgaatagtgcctttattactaaaaataattgctagcgtttctattgtgacgacacttggaattgtttttacgctctctaatgaaacaatcatgttttttcaaaaaatatcattatactcctttttgacggagaaagaatggttaccattttttgaagaccctaaattcggtatattaccactcatatgtggaacgttccttataactgcaattgctatgtttgtagcaattcctatcggtttagcgtgtgccgtatttttaagcgaatatgcttcaaatagtgcacggaaaatattaaagccgatgttagagctattagcaggtatcccgacaattgtatatggtttttttgcattaacaattgttacgccgcttttacaaaggcttataccagatttacagttttttaatgcgattagtccaggaatcgttatcggatttatgatgatgcctacagttgcatctctatctgaagacgcgatgagagctgtgtcgaaagggacgaaagaagcttcattagcactcggggcgacgcggtttgaaatggtaaaacaagtggtgtttccgtccgcttttacagggattatggcagcaattatattagcggcttctcgtgcaattggtgaaacgatgattgttgtaattgcagcaggatccacaccgaatgtatcgcttgatccgacacattctattcaaacgttaacagcctatattgtgcaagtaagtttaggtgatgctccgcatggaacgattacgtattacagcatgtatgctgtaggtgcaacgttatttttgtttacctttattatgaacatcatttcgcagtctattatgcgccgttttaggaggatgacataatatgcgaatgttgaatcataaaaaaatacaaaaaaacatggcatcacgctttttaaaagatcgaatttacaaattgttattttatatagcaattttattttcaatggtaattttgtttttgttactgtttcaaattgttgaaaaaggtataagttatctttcaataaatttctttacaaatttcgcttcacgtaatccgaaagaagctggtattgctgcagctttgtcagggacaatattatttatgagtattgttatacctgtttcttttatatttggagttggaacagcactttatttagagcaatatgcgaaggaatctctatttaaaaaaataatagagattaataatcaaacgttagcaggagtaccatccgttgtatttggattgcttggtttaactatttttgtatatgctcttcatttaggagagagtatagttgcagcagcactgacgatgagtctactcgttttaccaacagttgttgtggcgagtcaagaagcaattcgatcagtaccaagtgtattattagagggttcttacggattaggtgctacgaagtggcaaacgatgtatcaaattgtattgccatatgctttcccagggattataacgggctgtacgttagcgatatcaagagcaattggagaagctgcaccactattagttattggggcacttgcgtttgcaaattatgttccatttagtatgtttgatagatttacagttctaccaattcaaatttttaattggatgagtaggccacaagaagaatttcagtatgtagcagcagctgggatgattgttttgttaggtttgttgctatttattaatatatttgttttatggttacgaaatcgaaaataagttggaagtggatgaaaggggaattcaaatggtagcaacagtagtaaatgtacaggtgaaaaacgaagagaaaatcgagactgcgccaaagaaggtagtatttgatacgaaaaacttaaatttatggtatggggaagaccatgctttaaaagatattaatttaagtattcatgagaatgaagttacagccattatcggtccaagtggctgtggtaaatcaacttacttaaaaacattaaatcgcatggtagaattagtaccgattgttcgaactacaggtgtaattgaatatagagaacgcaatatatttgataaatcatatccagttgaagaattaagaacgcatgtaggaatggtgttccaaaagccaaatccatttccaaaatctatttatgagaatgtagcatacggtccaaaaatccatggtattcgtgacaaaaagacattagatgaaattgttgaaaaaagtttacgtggagcagcgatttgggatgagttaaaagatcgtttgcacgataatgcatacggtttatctggtggacagcaacagcgtctatgcatcgcacgctgcttagctattgagccagacgttattttaatggatgagccaacatcggcattagacccaatttcaacattaaaagtagaagaattaattcaagagctaaagaaagattttagtattgttatcgtaacgcataatatgcaacaagcagcgcgtatttcagacaaaacagctttcttcttaagcggggaagttgtggagtatacagatacaaacaaattatttacgactccttcagataagcgtacagaagattatattacaggtcgctttggttgatatcgtttcaaagctaagagcaaatgccctcttaacagagggcatttcttattttatcttactgttaatagagaactaatacttctccttatcttaaggtttattacaagcgcaagaggctatgtaggagatttaccccgctatttgcgggcagtaagacccccaccttaaaatttagcgaaagcaaagaagttagggaggggatcttgctgcctatcaaatcccgattgatgagggttgattaaagtttcacttttatataatggcacataatattgagggggaagaaaaatggtaagagaacagtttcaaggtgatttaaaagcgttacagcaaaaggtgatcgagcttggagaattagcaaatgcggctttattgatggctatggaaggtctgcatacaagggatgtagagaaagcgttagaggtcattgatggtgattaccgcatggataatttagaagaggaaataaacgatcttgcgcttatgctcattacgaagcagcaacctgtagcaagtgacttaagaaggatttttatttcaattaaaacagcgacagatttagagcgtattgcagatcatgctgttaatattgcaaaggctacaattcgtcttggggaaaaagaagtggctgttagtttgcacaacctggatgaaatgtttgcggttgcaaatgagatgttgcatttagcgctagaagcatatgaacaagaaaatttaacttttgcgaaacaaattgctgaaatggatgattccgttgatgaaatatatggaaaagcaattcgtgagtttatatcgtcggttccggaacaaccagaagcaattacgcaaattacacaattatcatttgtcgcgagatatattgagcgtgtagcagatcatattacaaatattgctgaaaatgtcttttatttagtaaaaggaaagcattatttattgaatgagtaggaataaaagcaggtgatgagaaatcacctgctttttttagtcaaaacatgacaaaaaaagctcgttgtttcctttagtttatgatgataagatgtatcataatgtaatggaaaaattagtatatatgtttgtcgttaataagtattatttaccaatttatagtaagcgctttcttgttgtttgaaacatacgtttttataggtgagaaatttaattatatggtcttctaaatgaggatttgtttaactaatcaagtttatgctgctagttcatgtgggatagggaatatacatatggtatatggagttactgaacattatataagtggaggctgaagtatatgaagggggttattttagctggaggaaaaggaagacgccttagaccattaacatgcaatactccaaagccgatgttaccattattagaaaaaccagttttagaatataatattgagttattacgtcagcatggtattcgtgaaattgcaattactgttcaatatatgagtacgaccattaagcaatattttggtgacggtagtaaatggggagttaacttgtattattttgaagactctcctccgcttggcacagcagggagtattaaacaagcagaacaatttttagatgaaacatttgttgtgataagcggggatgcattaactgactttcaattatcagaaggaattaggtttcatgaacaaaagaaaagaatggtaacaatgtttgtgaaagaagtagaaaatccactctcatttggattggttgtaatgaataaaaaccaggaggttacacgatatatagaaaagccgggctggaatgaggtagtatctaatgttgtgaatacaggcatatatattatggagccagaaatcttttcttacataccgcctaggcaattttttgatttcagtcatgatgtgtttccattattggcaaacaaaaatttgttattcgcatatttgtcagaaggttattggttagatatcggcacatttaatcaatatcgacaagcacaatttgatttgttaacgaaaaagttacaagtacctattccttatacagaagtattacctatggtatggatgggggaaggggtgacgattggtaaagggacgaaaattcatggcccctcttttattggagaaggagcaaagattggtacaggagctgtaattgagccatattctattattgggaaaaatagtatcgtttcaagttattctcatcttcaaaaaagtattgtttttgcgaatgcccacattgggaagtattgtgaactattagaaacgacaataggagagcgtacaatagttgaagatgatgttacactgtttcaaaaaagtgttgtagcggatcactgtcatatcgggagaagtacggtaattaagcaaaaaggaaaactatggccttataaggcgattgatagtcattcgatagtaggagcggctggtattcaagagagtgaaatgagtgcagggtggttacaaaaaagccgcattgtaggaagagggaatgttgaaattactccccagtttatcgtgaagattgcgatggcgtatggttctctttttgaaaaaggagaaagtatattaattggaagtcaagaaaatatagaaacaacctcttataaaaatttatttttacatgctattcatggtatagggattcatacgatggaatgtaaagaaatgaacgagtcactttttcaatatagtgttcatcatttgcaatgtgcaggtggtgttttcattcaagtggagaatgagaatgagattgttataaagttatacggtcaagctggcatgccgttaacgtataagcagcaaaaagagatagaacaaatatatatgtccgaattgttttattacgtgcaggagaaagaaatggggcgtaataagctcgttcatgtttctatgaatgagtatatagaagttatattggagcatattgatatcgagaaaatacagatgcagaagtttcatcttcttattaataagagaaatgatacgttgcaacatttacttatgctctttctgcaaagacttggttgtacagttacatggatttatgcaagcgaacaaaaagatcatgtgaaagctttgatgaaatcaagtaaagcgaatatggctcttatgttttcggagaaaggaaatcatttcgagttatacgataaacatagtaatatttaccaaggtacagattttgaagaggtagatattccagatttcttgctcgaatcgacaggaaatatttacccaatgtctttgaagttaggagaatgttatcttctattttatacgcaggatgaaagaaaatcgtttcaagtgaggtggaagcgagatattttatatcggattggaaaattattcgagctaatagcattgcaaggaaaaacgtttctcagcatagtagagcaatcacctccgctctatttactttatgatgaagtggtatgttcatggaatgaaaaaggggaaattatgaggaaattattggatgatatagaaaggaagggagaagggatatttgaaggagtgcagttcaaatatactgaaaaagagtggtcttatatcgtttctgacataaaacaaccaaaatttttggtgtattcacatgctagaaacccagtaatagcaagggaaaatatgaaaaatcttatagaaaaaattagacaatatcaaaaggtgtagaatttttattttaaaagtggtattatagtatagtctgatttaagttattagtactggagggaaataagaatgcgtgtgaatattactctagcatgtacagaatgcggagatcgtaactatatctcaaagaaaaataaacgtaacaacgctgagcgtatcgagcttaaaaagtattgcaagcgtgacaagaagtctacgttacaccgtgaaacaaagtaagcagtaggaatattttcctactgtttctttttttattcgattcctatgttaaaagtgatacactatcagcatagagtaaagtgtcactgtaagggggagaatgtgtgaaagcagagaaagtacgtttgcgtaaacaaataatagaacacatgaattctttatcagaagaacagtatacaactttatcagaacagattgtattttcgttgtatgcgcaaaaagagtgggttgaagctaaaacaattggaattactctttcaatggaaaatgaagtgaatacatatcctattatcgaaaaagcttgggaagaaggaaagaaagttgtagttcctaagtgtaataaaggaacaagaacgatgtccttccggcaaattaataattttgatcaattagaaacggtgtatatgaatttacgtgaaccgattcccgggcttacggaagaagtgaatatggatgaaattgatcttcaaattgtcccaggcgtagcttatacagaacgaggagagcgaattgggtacggcggtggctattatgatcgttatctcgtgcattataaagggaaaacgctgtcattagcgtatgattttcaaatggtaaaacacattccggtagagccatttgataaaaacatagaaaaaattattacagaaaaaggaacactgcttacaaataagcttgtatagacaaataaaaattgacgagactttttcttcttgattataataaaatatgtgaacgttttcttattataattttttatagtaagtgagcatagagggtgatgaaatggtatctatttatgatattcagcaattgctaaagaaatttggtacgattatttatacgggagatcgaattgcagatttacaattaatgcaagatgaattgcgtgaattaaatcaatcacagctaatcgatccacaagactatcaaacagctttatttttattgaagcaagaaattcaaaaagagctaaataagaattagataaaggtaggtaagcaacatggaagagaaatggttagttggtgttgaccttggtggtacaacgattaaattagcatttattaatgtgtacggtgaaattttacataagtgggaaatccctacgaatacaggtgagcaaggaaaacatattacacttgatgttgcgaaagcaattgataaaaagctagaagaattaggcgaattgaagagcaagttaattggtattggtatgggagctcctggtcctgtacatgtggcgtctggaatgatttatgaagcggttaatttaggatggaaaaactatccgctaaaagatttattagaagtagaaacaggattacctgttgttattgataatgatgcaaacttagcagcgcttggtgaaatgtggaaaggtgctggtgaaggtgcaaaagatttaatctgtatgacacttggtacgggcgttggtggtggtgtaatcgccaatggtgagattgtacacggcgtgagtggtgctgctggtgagattggacatattacagtcgttacagaaaatgctttcccatgtaattgcgggaagtctggttgcttagaaacagtagcatctgcgacaggtattgtacgtgttgctatgcaaaaaatacaagagactaataaagagagcatgttgcgttctatgttagctgaagaaggacgtattacatcaaaagatgtctttgaagcacttggacaaggtgatgaattagcaggtgaagtagtagaaaaagtagcctcttatttaggattagctgtagcgaacctttctagtacattgaacccagagaaaattgttattggtggaggcgtgtctaaagctggagatgcgctattagaaccaattcaacgctatttcgagcaatacgctttctcacgtgctgtaaagagcacgaagttagctattgcaacacttggtaatgatgcaggtgttatcggaggagcttggcttgtaaaaaagcacaaatacgaagcgaagatgatataagttgtgaaatatgaaaagaggaagggggaacccttcctctttttgtgtgaaatctcgatgaagaataaagtgtaaacgaattaagctgctggtggatacccgttatatagaacagtcatgatcgtaaaccatccgaaaacgagtacagttgcaattgcaaagccgctcgcgaaaaagtttttttcacgaagtgttctaagcgtagcaaatacagctaacagagtgacaagtgtaaaaataataacaaggcccatacaatatcctcctctgtctacccatttcttattatgagtttttggaatatttactcttttatattgtacatgttttaaaaatgattgtcgagatagcatcctttcttttcctcagagaaagaaatgttgtatcattaaaagtaagtttaataactggaggagattttcatatgaaatggatacaaatgccgttaggcccattacaaacgaatgcttatattttaatgaacgatcaaaaagagtgcattatctttgaccctggtcatgaaggtgaaaagctcgttacatatttacaagaagaacaattaaaaccattagctgttttattaacacatgctcactttgatcatatcggtgctgttgatgcggtaagagacacttttcatattcctgtgtatgtacataaagaagaagcagattggttaggagatgcaactgtaaacggctctcaaatttttatgatgaaccgcagtattacagcaaaaccagcggatcatattattgatgcagaaggtacattaacaattggatcatttaattttgaaatttttgagacaccaggacattctccaggaagtatttcttattatagtaaagaggcgaatgctgtattctcaggagatgtattgttccaaatgagcattggaagaacagatttacctggtggaagtttcgctgaattaattggaagtattgaagagaaattatttgtattaccagatgaaacagcggttttatgtggacatggtccagaaacaagcattggctttgaaaaagaaaataatccgtttttacaataaggagtcattatgggaatggagctcattttaagagaatggatggggaaagaaaaggattattcaatttcatatagtacgtatatgaaccttgtattgtatacagaaggtcatggatattatatgaaagaacgtgaaaagattggaagacaaggggatttttttacaagtagcaacgtatcctctgtgtttgcaaaaacttttgctaaactttttattcgtcttgttgaaaatggtgaagttgctccgaatatttgtgaaattggcggaggaacagggaagtttgcctatgatgttttacaagaatggaagcaattatctccaaaaacctttattgatctaaactattcaatgattgaagtgagcccttttcatagaaaattacagcaggagcaccttggctcattttctaatgtatcgtactatacctcctatagtgaaatgggagattctttcgagggaattcttttttcgaatgagttgtttgatgcatttcctgttgaaataattgagaaaagaaatggtatgttgtatgaagtacgtattacatatacagaggaaggaaacctttcagaagtatgtaggccgttagataaaagaattggtcgctatttattgaaatataatattcatattgctgaagggcaacgttttgaagtaccaattgtgatggaggagtatataaaagaaattgcgaaatggtttcaaaaaggtatatgtattacagttgattacggatacacaaaagaagaatggatgtatccagcacaccgtgaaggaagtttgcgagggtattatcagcataagctaatacgtaacccactagcgcatccaggtgaaatggatcttactactcatattcattgggacgagctaaaggagatgtttagtatgcaaggaatgagtgcagtatggcataagaaacaatctgagttcttgttagctgcagggatattagaacagcttacgagccatcaagatatgaatcctttttctgaaacgcaaaaacaaaatcgagccgttcgttctatgattttgaatggaggagtagggagtgcatttgatgttgttatacatacaaaagatatgcaacatttacatttggatcgatatgtaacaatataaaaaaacaagacacagtatatactgtgtcttgttttttaatacgacttatgtagtattatatatttcctctcatgatatatatttatattaaagatatgagatgaaaaatatagaatacgttctttttcttcgattattagtccctaacctaataatacgcgaacgagttgaatgattgtttcattctctactttgtaataaatttccaatccttttctttcactagaaacgattttagcgctttttaattttgctaaatgctgtgaaattgtagattgtggcatgtttaagccagtatacattgtagaaacgttgcttggaccgcgctcgattaatccttttacgatacataaacgaacaggatgagctagcacttttaataattctgcattactttcatatagttctaattctttttgaaaggtttctaacatgttcttttccacctccgtgtgagctattataccatactatacataccaaaaatttaaagaaaagaaaatagttgttgcagaaaaaaagtcctaaagtaaagaaattgtaagaaaagagaccctgatgtaaataaaataggtaaattagcatgtttttgtaaaatgacatttttgggtgaaaatttcgatgtgttttaaaaattgaaagatatagatatatttgtaacacaattttatcatgattttcttattctttcaaatgaatatacaaaatttttaaaataatatgacaaaggaattataatgatatatatagaatataaaacaggttaaaagaaaagaagctgaatgtaattcgcttctttatggtgataatgaaatatttgcttacggctgataaatcttaggatgatcaagtcattagtcatttattctaaaattcatcttttagcaacgttaaaaacctgtgattccatatgttctcataaaaatcaattgtctcttttgcggacataaaaggattattcaacgtagaggttgttttctgtaccataaagttttcgtatcctagtccgtgggcaaacttaatcgtagcatccatacagtactctgtttgggcgccacaaaattcaatgcaatttacagataattgatctaaaatttcttttaagtttgttttataaaatgaatttgcatgtgtttttcttacaaaaaaatcttgttcttgaacatctagatcggtatgaatagcccaaagttctttctcgggtactaaatcatcatcacaatgttgaacaaaaaggattggtttatttaattttctgtatgaataaattcttttatttacttttgttagtaagttctgtaaatcaaataaatgctcctcgctataacatacgccattttgtaaatcgataacgattaaaatatctgaacaaatatccattattttcacccctttttatttcttaatatatcaattaatccattatttagaaatagatgatatacttttatttttttatggactataagaaaagaagaaattcaaatgaatataactaaaacgcagaaaaagaagatatgaaaacctaatctcatatcttctttttctctatgcatttacaggttcttctacataagaaagggcattttcaaaatcggatattaaatcgttaacattttcaagaccgactgataaccgaagtaatgaattagagattcctctttcatcacgagcttcttgcgacagtgctgcatgtgacatttttgctggataagaaagaattgactctacagctcctaaactaactgcaaaaacaggtaattttacttttgataaaaattggcggagtgcatcttctgactgcaaagtaaacgataagaccgctccagctgatgttgcttgagattgttgaatatcaaatccgagatgtgtttgtaatcccggataatagacattttgtactttagcgtgctcttgtaaataatgtgcgattttattggcatttttagctgaatgctcgaggcgtacgtgcaatgtttttagaccgcgaagtacgagagaacaatcttgaggtcctaaaatagcaccgaatgcattttgtaaaaatccaagcttttgagcgagttctgcatcttttactactgctaatccggcagtaacatcactatgaccagcaataaattttgtagcactatgaagaacgacatcagctccaagttcaagtggtttttggaatagtggtgtcaaaaatgtattatcaacaaaagtaagagcgccaatagattttgcgagtttagaaacctcgcgaatatctgtcacttttaaaagtgggttagaaggtgtttctacataaaagagctttgtatttggtttcatgttttgttttatttcttctaaattggtcatatcaacaaatgtatgtgaaacaccgtaacgggagagtacctcagttatcactcggtaagtgcctccgtacacatcttctgaaatgagtacgtgatcaccttgtgaaagaaggaggaatgcagtggaaatcgctgcaatgcctgatgcaaaggcgaatccttttgttccgccttctaataaagtaatgatatcttcaagagcttcacgagttggatttcctgacctgctatagtcatattttccgaacgtatctacatcaaactggtgaaaagttgatgtgttataaataggaacgttcacagcgcctgtttgcgagtcatgtttatattggttgtgtagtaagagtgtatctatagaatagctcatattcttacaccttcttttacgagtttaatggcttgctttaagtcttgaattaaatcgttactattttcaatgccaactgagaatcgaagaagacgattgcatacgccgtttgctgttctaatttcttcaggaatatcagcatgtgtttgcgttgctggataagtcattaaactttctacaccaccaagactttcggcaaatgtaattaaggataaagattgtaagaatggattaatccaagcttcatctttaaggcggaatgaaatcatgccgcctcttcctggataaaatacatctgtcaccccgtcttcatcatttaaatacgcaacaactgctttcgcattttcttcatgttgtctcatgcgaagcgctaacgttttcataccgcgaattaataaccatgagtcaaatgggcttaaaactgcacctgatgcattatgataatgagcgatttcctcgcaaagttcctttccttttgcaacgacaagcccgcttagtacatcgttatgtccccctaaatatttcgttgcgctatgaagtacaatgtcagcaccttctgttaatggttgctgtatataaggtgtgtagaatgtgttgtctacaataagaagtagtccgtgccttttcgctacagttgcgacagcagcaatatcagtaacttgcattaatggattagttggagtttctatgaaaatagccttcgtttcagttgtgatagcttgctcaatttgtttaatagactgtgtatttacgtatctacatcgaacattccactttttttcatgctcagaaaataatcgatacgttcccccgtataaatcttcagatacaataagttcgtctccagagcggaatagagaaaggacgaggagaacagccgccatccctgaactacaggcataaccttgttcgccatattctaagtctgcgatcgcctgttctaaaagaccgcgagttggattgccagttcgtgaatagtcaaagccagtagatttaccaattccttcgtggcgataagcggttgagaaataaactggtggattaaccgttccagttgtagtttcactacgatttccgatttgtgctagttttgtttcgattgttgacatgtgaaaattcctcctttttaaattgaaacattaagtgaatataaaataaaaaaagccttctaagaagaaggctttcggtttgaatagagtcttcttctcatctgtcaaatctttcacaatttgctggaattagcaccttattaacaaaatgttaatggttgctgaggcgtcacagggccagtccctctacctctctagataagaatgttcgtatgaaatttttattatgtttttaactttacaataaaagataattgaattgcaactttattttaaataatttttatttttccgcaagtgtcattgacttttaattttgtgcatgctaaatttattaaaaaattaacaaacattgttaaaaggggaacgcatttccttttagctacataaataaaataataaagacaactcttattgagagcggtggagggaaaggccctgtgaaacccggcaaccttcaaacgaaatgtttgaaacggtgctaatacctgcaaaacgaatgttttgcataataagaggaggaacaattatgtccccctcttcaaagtgaagagggggtttttatattgatagaaatgagggagattcgtgaaattactagatttattatcaaaaggaattgtaataggtgatggtgcggttggaacgttattgcattcacatggtttgcaaagtagctttgaagaattgaacgtatctgatccagatctaattatatccattcataaacaatatgtagctgctggagcagatgtaattcaaacgaatacgtatggagcaaatgaggcgaaattacgtatgtatggtttagaaaatcaagttacaaaaattaatagagcggcagtgaaattggcgaaagcatctgtgacagataaaaatgcaattttaggaacaattggtggtatgaaacatatcggagctgttacaacgactgatatggaaagggagtttatgttacttgaacaggcgggggctttactagaagaacaggttgatggattactattagaaactttttatgatgaatttgaattacttcatgctgttaaagtgttgcgtaagcaaacgaatattccgattgttgcgcaattagcgttacatgaagcaggtacgactcaaaatggaaatgatgtcaatgaaatattaaagcagtttatagattacggtgcaaatgttgttggattgaattgtcaactggggccgcttcatatgacggaagctttcaaaatgatatcgattccgcaaaatggctatttatcagcatacccaaatgcaggtctcccgaattatgtagagggacgttacgtatatgagggaagtccagcttattttgaagcaatgacaccgaattttattgagcaaggtattcggttattgggtggctgttgtggtacgactccagaacatattcaaagtatgaagcgcgctgttgcgaatattacccctgtaatagaaaaagaaacgattcaaaggccaaaagtcgttcatacgcatgagaaacgttcgaaggctcacgtcactctagcagagaaagcaaaaaaacaaacgacagttgtagtggaattagatccaccgaaaacgttagatacacagcgtttttttgaaggagcaagagcgttaaaaagagcgggagcagatgctattactctagcagataattcattagcatcgcctcgtgtctctaatatggcgatgggtgcgttattaacgaagcatgatatcccagtattgacgcatttaacgtgtagagatcataacgtcattggactacaatctcatttgttaggtttatcggcgttagggatggaagaagtgttagctttaactggtgatccagcgcgcgttggtgattttcccggtgccacttctgtatatgatttatcctctattgagcttattaaaatgattaaagaaatgaacgatggacgttcaattttagggaaatcaattggaccggcgacaaggttttctgtaggcggcgcatttaatcctcacgtgaggcacttaaaagcagcagttaagcgaatggaacgaaaaatagatgctggagcggagtattttttaactcagccaatttacgatatcaagttaattgaagaagtgtatgaagcgacaaagcatttggaacaacctatttttattggaattatgccgttagtaagtaagcggaatgcagattttcttcattttgaggtgccgggtattactcttcctgaagaaataagagagagaatggatggacatgaaacgaaagaggcagcaattgaggaagggattcgcatttcacaagaattggtcgacgcagcgatgaaatattttaatggtatttatcttattacaccatttttaaagtatgaaattacagaacatcttgttaaatatgtaagagaaaagcaagaagtgaaagaaggtattaattgatgaagtgtatagaagaaaaattgaaaaatagcattttaatattagatggtgcaatggggacaatgattcagcaagaggatttaactgctgaagatttcggaggagaagagtacgagggctgtaatgaatatttagtggaaacaagaccagacgttattttaaagattcataaagcttatattgaagctggagcggatattattgaaacaaatacatttggggcaacgaatattgtactaagtgattatgagctgtctcatttagatgaagaactaaatgaaaaggcagcacttttggcgaagcaagctgttaaagaaagcgggaatgaagtatatgttgcgggagcgatgggaccaacaacgaaagcaattagtgttactggtggtgtgacttttgaagaattgattgaggcttatacaaggcaggcacgaggattattaaaaggagaagttgatgtattactcgttgagacgagtcaagatatgcgtaacgtgaaagcagcttatattggaattcaagctgcttttgaagaactgaaaaaaacggttcctattatgatttcaggtacgattgagccaatgggaacgactctggctgggcaaacaattgaagctttttatttatcagtagaacatatgaaaccattatctgttgggttaaactgtgcgactggtccggagtttatgagggaccatattcgttcactatctgatttatcggagtgttacatttcttgttatccaaatgcaggtcttcctgatgaagatggacattaccatgaatctccatcttctcttgctgaaaaggtgaagcgatttgctgaagaagggtgggttaatattattggtggttgttgtggcacgacaccagaacatataaaagcaatgaaatccgcgctagcatctcttaagcctcgtgaccatcatgagagagaaggacatggaattagtggattagaagcactgcaatatgatgagtctatgagaccgttatttgtaggtgaaagaacgaatgttattgggtcacgtaaatttaaacgattagtagcagaagggaaatttgaagaggctgctgaagtggcaagagcgcaagtgaagaaaaatgctcatattattgatatttgtatggcagatcctgatcgcgatgaaatagaagatatggaaaacttcttagcagaagttacgaaagttttaaaagtaccgattatgattgattcaacagatgaaaatgtgatggagcgagctcttacttatattcaaggaaaagctgttattaattcaattaatttagaagatggagaagaacgatttaaaaaagtgacaccgcttcttcagaagtatggtgctgctatagttgtaggaacaattgatgaagacggtatggcggttagtgcggagcgaaagatagaaattgcgaaaagaagctatgaattacttacaaagaagtatgggatacgcccgtcagatattatttttgatgcacttgtgtttccggtagggacaggtgatgaagaatatattggttcagcagcagcgactatagaaggaattcgccttattaaagaagcgttaccagagtgtttaacgattgtaggggtaagtaacatatcatttggtttaccaccggctggacgtgaggtattaaattcagtctttttatatcatgctacgaaagcagggttagattacgcgattgtgaatacggaaaaattagaacgctatgcgtcgattccagaggaagaaaaacgccttgcagatgcactactgtttgaaacgacgaaagagacgttagaagaatttacaaacttttaccgagttgctaaaaagaaagatatcgttgtgcaagaaacgttaacgcttgatgaaagactagcaaattatattgtagaaggtacgaaacaaggattacacgaggatttaagtcttgcgcttgaagaaggaagaaaacctcttgatattattaacggtccgcttatgacagggatggatgaggtaggacgactatttaataataatgaacttattgttgctgaagtattgcaaagtgctgaaagtatgaaagctgctgtaagctatttagagccacatatggaatctagtgatagtgcgaaaaaagggaaagtattattagcaactgtaaaaggtgacgtgcatgatattgggaaaaatctcgttgaaattattttagcaaataacggatatgagattattaatttaggaattaatgtacgttcggatcgaattgttcaagaagtacaagaaaagaagccggatattataggcctttccggtttattagtaaaatcagcgcaacaaatggtaacgactgctgaagatttaaaagcagcaaatattgatgttcccattgttgtaggtggtgcagcgttaacgagaaagtttacagataatcggatttcaccatcatataaagggctcgtttgttatgcgagtgatgcgatgacggggctcgatattattaataagcttcaaaaagaagaagagcgtgagaagatgaaacaggataaaaaagaacgtcatcttcatatcgtaaaaaaagaggagaagaaagtagaaattccagcagtaattgagtcattaccgaaggctgaagttatcgtgcctgattcaacaaaacgaattgtattacgcgatattccggcccttcatctcgctccatttttaaatagacaaatgctacttgggcatcaccttggattaaaaggaaatgtgaagaagcttttgaaagagggagataagagagcacatgaattaaatgatttaatagatgaattattgcaggaaggacaatcttggttaaagccgaaagcagtgtatcaatttttcccagcgcaaagcgacggacaaaacattgtaatatatgatccagaagatcatacgcgtgttatagagcgtttcacattccctagacaaggaaaggctccctatcgtactttaggtgattatttgcgcccaataggagatgagatggactatgttgctttcttatctgttacggttggggaaggagttcgggacattgctgaagagtggaaggcgaaaggtgattacttacgtagtcatgccattcaatcgttagcgcttgaattagcggaaggacttgctgaaaaaacacatatgctcattcgtgaccgctggggcattccggactcacctgaactgacgatggaagaacgtttccgtacgaaatatagaggaatacgagtgtcatttggttatccggcgtgtccagaacttgcagatcaagaaaagctatttcgcttaattcatccagaggaaataggtatttcattaacagaaggattcatgatggagccagaagcgtccgtaacggctatggtattttctcaccctgaggcaagatattttagtgtattatagtctagaagggggagacgtatgaagaaaatagtctttacaggtggcggttcggcaggacatgtaacacctaatttagccattatcccatatttacaggaagacaactgggatatctcttatattggttctcatcaaggtattgagaaaacgattatagaaaaggaaggcattccctactatagtatttcgagtggaaagctacgtcgttattttgatttgaaaaatataaaagatccttttcttgtaatgaagggtgttatggatgcgtatgtaaggattcgaaaactaaaaccagatgtaattttttcaaaaggcggtttcgtatctgtaccagtcgtaattggaggatggctaaatagagtaccagttttattacatgaatctgatatgacaccaggactagcaaataaaattgcgcttcgttttgcttcgaaaatatttgttacatttgaagaagcagcgaaacatttaccgaaagaaaaagtaatatatacgggatctcctgtacgtgaagaagtgctgaagggaaatcgtgaaaaaggtttagcgtttttaggtttttcacgtaaaaagccagttattacgattatgggaggcagcttgggcgcgaaaaaaattaatgatacggctcgagaagcattaccagaacttcttaaaaaatatcaaattgttcacctttgcggaaaaggtaaccttgatgaaagtttacaaaataaagaaggatatagacaatttgaatatgtacatggagaactgccagatatattagcggtaacagattttgttatttcacgcgcgggctccaacgcaatttttgaatttttaacattacaaaagccgatggttttaattccattatcgaaatttgcaagccgtggagatcaaatattaaatgcagagtcctttgaaaggcaagggtatgcctccgtattatatgaagaagatgtaactgtaaaatctcttataaagtatgtcgaagaattgaatcaaaataatgagaagtataaaacagcactaaaaaaatataatggaaaagaagcaattaaaacaatcattcaaaatatttcagaggcatgatgaaacaatcatgcctcttttagtagggtgaaagattccaagaattgatatttttatgttacaataaagtgaaactttaatcagttgggttcatcccacatctaacttctttactgttactaaattttgaggaggtagtcttactgccctcaaatagcgggataacaaatgggttaatagggaaattccaattaatgaggcgtgaaaatacgaatggattaggagtgactgtgttggagctaagtctctatgaaaatactgcacttattatatgctttgtgttgtacgttggtagtgttattgtttatatttcaaggaaattttcgcaagaaagagagcttgaaaagtcagagataacagctgaactagaaatgttagctgatgaaagttataaaaaacaaaaaataaaagaagaccatgaagcatcccatcatttaaacgcaaataagttttaaagatggggattttttttgaaattgttctttattatagctataacaaataacgctaaaaaggagtttccccatacacaatgaaggagtgtatataaatgaatttttatatcgcctcaggtttccaaaataaacatcttgtacattccgtagcaaatgaactgaaacatgcaggatggcaccatacatatgattggaccaaaaatgaaagagcagcgaatgaagaacaattaagagaaattggtcaggcagaacgaaatgctgtaaaagaagcggatgtatttttacttatattagatggcggaaacgggagccatacagagtttggaatggcgattgcactagagaaaacgatatatgtatatcatgcaggaaacccgctccaaacaacgttctatcacttgccagaaataaatatttttgaaggagatgtagctgagtttgcatcttttgttatgaatcatgtgaaataatagtaactacctaaaaggttataaaagtgatcttttgggtacagtgatgataagaaacgtatataaaggagtacataatatgaaattagaaaatggatgggaaacgagctttttagaagtcgtacaaaatagtgaatttaagaaagaggcacttcttagtcaattgctttgtcaggatagtgaagaagtagaagagcttgtggatgattacggctacgaagaacttgttgaacgtgaacatgatgatgagttagctgaaatcttaggagaagaactttttagtgagatagaacgccaagtattcttatcttcaaacccagaagaaaaacttatttcattcgtcaatggattaggttttcatgtgctagattggatcgttcttcttgaaacagaatttggcattgatagtgcaaactttacatcagatgctgtgaaggtgttagaaaagcgtttcagacagtttccatacatagaggacaagacaatttttgatatgacatttggagaatcgatggatgtattagaatctgttacaggattacaactaaaggaaaagatgaacgtataatgaaaaaagaacgtgattggatcacgttctttttttacataataataattttatcatctagttttgtctgcccggtaagaagtgcgtttaaatattccacttttcttatacaagcttgtatatgtctttcaatctcttgtaactctgcttggtgatgcgtttcaattggatgaatttgtacgttgaatttttcaaattgactactatatgttatttctgcatagccgctcataatatcggtttcgttatgaaataaaaattgcttcgttttgtcacagaatgatacatcctgaaagccatatacttttaatgcttcaattacttttttaatcatttttgtattcattttttaaccctctttacgaagttctacttatatattataacataaaaaattacatagaaagcgcttccaagtgtgttttattataaactttacgtttcaatcacaaaaatgaaacaaagaaaaaataattgtaaagaaggaaggactcttttattgtttcgtcatatatatagagaaatagtgcaatgaaaggaaattttccgaggtggagatcgtatttccaatttgagcgcagtaaaagaggtgagaattttgaactttgatattgtaggacaaaaagcatatataaaagatggaccgcatcggaaccgaattggaattgtaaagaaaaacgagacaaaattagcatcgcagtttgctattgtaattggagaacaaatcattgatgtagagctaaaggatatcgtgttagttggagtagacgtaggacaatttcataaatggtgcgaacaaaatggttatttgtgaaaaggacgggctgtgagataatgaaatatatttgaggaaagaggatatgttatcatattctctttttctatgtttcaggaggcgaaaatgaaatataaagaacaggagtttacgttggagttaaaagagaacattcaatgtatggagaaggaaatagagcgaatattacttaaactgcataaagagtatgcgcatttatacatagaaaaacacatggaattagatatgggatttgcaagagaaaaagagaatccctttgaggtgggctattattcatcagttgccatagctatattagatgaagaaaaagagatgattgaatttcactatattccaatttggaaatgcgaaagaatctttttaggaatgtcaattcaatcaaacatttttgggagtaagaaagtaggggaacttgttgatgaatcttgttatgagattgaggaggagttaaaagagcaactagaagaatacttggagtaagaattctcaagataaaatctataaagagggaacggaataaaaaagacgctaacaattgtatgttagcgtctttttttcattatgaagcaatttcaccagtttttgtatcatcttgattgtacgtatcttgatctaattcaccaagccatttacttgaaataagacctgctgtcatagaaccacttacgttaagagctgtacgccccatatcgattaatggctcaaccgagataactagagcaacaataccgattggtaagttcattgtagatagtacgattaaagctgcgaatgttgcgccgccaccaactccggcaacaccgaatgagctaatagcgataacagcgattaaagttaaaataaattgtggttgtaatggatcaattcctacagttggagcgaccatcattgcaagcattgctggataaatacctgcgcaaccgttttgtccgatagataccccaaatgaagctgcgaagtttgcaattccttcggaaataccaagcttttctttttgagcttcaatatttaatggcatcgcaccagcactagagcgagatgtgaatgcaaaagttagtacagggaacacttttttcaaatattgaattggatttaaaccagacaatgcaattaataataagtgaatgataaacattacgataagtgctacgtaagaggctaacacgaagttaccaagttttaaaatagcatttatatcgctaccagcaactgtttttgccataagagctaatacgccgtatggagtaaggcgtaaaattaatgttaccatacgcattacgattgcatatacagcatcaagcattttcttaaatagttctgcttgttctggatattttcgttttacacctataaaggcaatgccgataaaggctgcaaatattacgacagaaattgttgatgttggacgagcgcctgttaaatcaagaaacggatttgtaggcaatagctctaataatttatctggaattgttgtcttttcaatagaagtaaatctttcttcaactagtttcagacgagcagattctgcatcaccttgttgcaagcctgctgcagatacatcaaatcctgcacttgcagcgataccgacagctgcagcgattcctgtagtaagaattaaaattccgataataagaccactgattttaccaaggtttttcgttaactgtaattttgtaaaggctgaaataatagatactaaaataagtggcataacgatcatttgaagtaatttcacataaccgttaccgattaagccaaaccaagtatttgattcaataattattttagaagttggttcataaataaattgtaatataagaccgaatataattccgactcctaaagcagtaaatacacgtttattaaaagatacatgcttacgttgcatataatataatacgccaactaaaatgagcatgactgcaacgttaattccgacaagcagtgtattcatgttgattccccctaattccaatctgttatatagaatataaggcaataaaacccataagtcaactaggaaattccggaattaaaaaaagatggcaaaatgccatcttttaatgtccagccccagggacaagtaaaaacgtcgtgtagtatgtaaatcctatgaagaaaacagttaaatatgccccaaatacgtatatatacatacgctctgttaattttaaatagcttaaaagtacgaagaaacctgtttgtcctaaaaatagtagtgcggtctgttgcatatcccctacgtaaaacataaccgagaaaattccagtccaaaagccgagaacgcgaaacatgcgctccatgccatctccctccttttctaaaaaaagtaaacctcacctcattatagtttatttttcttactattgtaaatattcattcacataaaaagaagccaattattattggcttctttttatgtgagaaattaaattgttagtttataattacaagatttacatccatctaatagactatcatttcgagttaattccatgttagggaataggatttcaaaaattcctttcatcatatctccgtgcatgttacaaatttcagttggatgatgaacagcaacttctttaaatggacaattgtgtacatcatagaaaatttttgttccatctgcacttaattcaaatgcaggtgataagccagctgttgagaaagcttcttttgcaatttgaactttttgttccactgttaaagcatcttcactcacatttaaacgttgcatatgttgttgcattaattcagctccgaattgttttcctgtttcgtatagcgctttctcaccagcagcgccaaggctaagtaaagaattaaatgcgattcttgctaacaattgataatcacggaatggaaattgtaattggataacatcttcagataagacatataatctgctcggtcttccgccttttccagttttcttcgtttccgattttagcatatgaacatcttctaatttagataaatgtaaacgcgctacgtttggatgaatatcgaattcatctgcaatttcttgtaccgttacgtaactatgtttttgcgaaatatatttataaatgtaataacgagttgggtcagataatacacctgtaatttttaaagcttgttccatgaggatctccacctttatcactttatccaagataataacattataatacagataaacattattataggtaatttcagacaataattcggaaattgttcataatttcacaaacatatttttccttttccctctattgaaaatacaaaagtccaaatttttattgcgcatgttttcatgctatatacatagtgaggagggaaaagtgatgaatgggattgaaatttttgcgaatacaattttaaaagaagcgtgtagggtacaagcgtcagatttacatattgtgccccggcagaaggatgtagcagtgcaactacgtataggaaaagatttaatgacgagacagtgtattgaaaaggagtttggagaaaaactcgtctcacatttcaaatttttagcatctatggacataggagagaaacggaagccacagaatggttcgttgtatttgcaaattgatggacaagaagtgtatttacgcctttcaacacttccaacagtatatcaagaaagtctcgttattcgccttcatttacaagcatctgttcagcccttatcacatctttcgttatttccaagtacggcagcaaaactactctcgtttttacgctattcacaggggttactcgtgtttactggaccgactggatctgggaagacgacgacaatgtatgcattattagaagtaattagaaaaaagaaaacacgtcgcatcattacacttgaagatccggttgaaaaaagaagtgacgatgtattacaaattcaaataaatgaaaaagcgggtctcacatatgaaacaggattaaaggctattttacgtcatgatccagatattattttagtcggtgaaatccgggatgaggaaacagcaaaaatagctataagagcaagtttgacaggacatttagtaatgacaacgctgcatacgaatgatgcgaaaggagcaatcattcgtttcatggattatggtataacgaggcaagagattgaacagtctttattggctgtagctgcacagcgacttgtcgaattgaagtgtccgttttgcagaggaaagtgctcaactttatgtaaatcaatgaggcaagtaaggcaagcaagcatttatgagctactatatggacatgagttaaaacaagcacttaaagaagcagatggagaatgtgttacttacaaacatgagactttagaatcgtcaatacgaaaaggatatgctttaggttttttagaagaagatgtttatgtttaagaaaacttggagtttaagtgatcaagtagtattgttgaaacgtttaggagaattattagaaaaaggctactctcttttacaagcattagaatttttacagtttcaattacctgtagaaaagaaagtacaattgcagcgcatgattgaggggttaaaagatgggaaaagtctacacgattcttttcatcagttaaagtttcatcaggacatgttaagttatctattttatgccgagcaacatggtgatatttcttttgctttgcaacaaggaagtgtacttctttataagaaagataagtataggagagacatgatgaaaataatgcagtatcctatgttcttgatgttttttctactaatcatgctttttatttttaacctcattttattacctcaggttgaaatggtttatagttcgttcggttctaatacaccactacttacagaacaaattttaagtgcaataaaactgctaccatacattattttaaccgctattttaactgttattattggatgtagtttatacatgttgtattttaggaaacttccacatattagacaggtaaaaatcatgcttcgtattcctctcatcaaaacatttcttattttaaagcattcacattattttgctactcagttgagtggtttattaaatggtggactatcagtatgcgaagctttaacaataatgatggagcaaagatatcatccgttctttcaatatgaagcgaatcggattgaaagacaattaattggaggagaacagttacaatctatcattgctaaaagtgggtattacgagaaagaactttcttatgttattacgcatggacaagcaaatggcaatttagggattgaattaggtgactatagcgatcttattatggaaaagatagaacgaaaaattaaacatatgttagttatcattcagcctattttatttacatgtattggaggaatcgttgtccttatgtatttagcgatgattatgccgatgtttcaaatgatgaattctatttagggggcatttgtatgcagaatgaggaaggatttactctgttagagatgctattagtaatggttgtcataactatattattactattaattattccaaatgtagttacacagcgttcatcggtccaaggaaaagggtgtgcagcttacgtgaaatctatagaagcgcaaatacaagtatatcaattacaacataataaaattccatcgttaaaagaactggcagatgaaaagtatattacaactgataagtgtccgaatggcgaatctattcatatatcagatgatggcacagtatcaattagggcattgtgaaacaacaagggtttacttttttagaaatgttactcgttttatttgttatttctgtattaagtatagttacgtattttagtgttcattccttatacgagcgacaaaaagttgaacaatttttgagacagttttcaaatgatattttgtatatgcagcaattagcgataaaccatcaaaagcactacacattacgttggcataaagatagaaatatgtatgctataaaagagtcaggtacaaagtattatatcgtcaagcgagagtatgaagaagatatacaaattgatttgcatacgtttccaaatccgatgacatataacccaagtggaaatattaatagaggtggtacgattataatttcgtatagaaattataaatatgaaattgtatttcagcttggaagagggagatttacgtatcgtgaaatgtcaaaaaggatccataatggctgaaatgattgtatcgttaagtgttttaatgatggctgtatcgttactactaccgcaaacagtattagttatgcaagaaagaaaaaatatacaaattcgttataaggcaactggattattaaaaaaagaagcagctatatatatgtatggaaatgaagaaaagcgaataatagaaaagaatataaatggaattgtgtattacacatattggggaggcaatgaagtttgtaccatgtggaaagatgtgaaagacagaatgatggaacaatgcttttatgtaggagaaaaaataaattagaatttggtttttcattaatagaaatgattgtatgtctgtttctattatcaatattttttttgctctttccccgcctacatttcattgaaatggaaaataaacagtcgaaagggttaaatgattgggagtgggatgtgtatttagggcaaatgcaattggagtttcgtgaagtatcatctggagaacagctagcatttgaaaatggagaaagtattttacaattccgatcgcgtaatgggagtgaagtatcgtatgaaaaagagaatagtcgtcttataagaaaggtaaataggcgcgggagggaagtcgttttacaaaatattggaacggtttcttacaaactaacacctcatgtactcattataaatgtgaaagatactagtgggaaaatatatgaaggtgtagttatgcgatatagcgaaataggaataaacgtatgagaaagcaaaagggatttacaatgcctggaacgattatctttcttattttattaacttctttttttatatacgaaacaaatatgttgtttacagataaaaatttttatataggaatagaacaaaaatttttattggatgaattacttaaccgatctattacagatataaaaaaagacttacagcaaaaagaaaaagaaggtacatttttctttcagtatgaaaagggagaagcgagtggaaattatgtctttgaaaatgatttaattctcgttgctttgcagtgtacactcaaacaggaagctttctatacggtgagttttcggtatagaaaaaaggatgggaaaatagtcgattggatagaaggataatatgtaaaatatatatatagataaaccaggatttcctattgtaaattgaattgattttttagaagaaatggataaatataatgattaaaagtttaaattttctcaaaaaagagaaaggtagaaagaatatgatatattcatgctatccaatcattatttttagggagaatagggaaatgacaaacaacaatcaaataggtgaaaataaggaacaaactatttttgatcataaaggaaatacgattatgacagaagatagagaaatacacattatttcaaaattcgaagaacctcttattgtcgtattagcaaatgtactaagtgatgaagagtgtgatgaattaattgaaatgtctaaaaataaaatgaaacgttctaaagttggttcagcacgtgatgtaaatgatattcgaacaagtagcggtgcatttttggaagacaatgaacttacttcaaagattgaaaaacgaatttcatctatcatgaatgttcctgcgtcgcatggtgaaggattgcacattttaaattatgaagtggatcaacaatataaagcacactatgattattttgcggaacatagtagatcagctgctaacaatcgtattagtacgcttgtaatgtatttaaatgatgtagaagaaggcggagaaacgtacttcccaaaattaaatctttctgtacaccctagaaagggaatggcagtatactttgagtatttttatcaagatcaatcattaaacgagcttacgttacacggaggggcacctgtaacgaaaggcgagaaatggattgcaacgcagtgggtgagaagaggcacttataagtaaaagcgagtgttacgttttgttcttcatagtataagaacaaaacgtttttttattaaacaaagtagcatctttcgttataataacaattaataaatgacgattgagaggacaagaaatgaaatctatatacataaccggctacatgggagcagggaaaacaacaattggaaaagcgttaagtaaagaacttcaaatggatgttgtagatactgatcaaaaaatcgaagagaagcaagagaaggcaattcgaaaaatttttgccgaagaaggcgaaatggcttttcgggaatatgaaagcgaaatgttacgtgcgctaccagtccataatgttattattacaactggtgggggaattattgaacgagcggaaaatcgcaagtggatgaaagagaacggaactgtcgtgtatttatattgtgatccgcatgtaattgcagaaaggcttcgtgaagatacgacacgtccactatttcaaaagaaagatatagatgcattcgtaaagaaatttgaatcacgccgagcttattatgaagaggctcatattcatatcgatacgacaaataagtctgtaaagcaaattatgaatgaattaaaggaaaagattaatgtataaaaaagtggacatactaatcaagtagaggtgatgataatatgtctactaatgattatgttcgctttgtgacgcagcagtttgtgtcgtatatggatgctccaaaagaagatcgaaaacaaaagaaagaacaacgccgtgctgaaaaagagccatttatgaataagtggtttggtgttatgccgctgagtgctgctttgttttaccgaaatgtaaaaagtaaaagaaaaaaatcaagttaaattttagtcatatgtttaacaaaccaaaaatcccctagtgtcgtattacactaggggatttttatttactgcacggattcttgttcttccgtaacggcatgtattttattatttacccaaacaaatccaattccgatacaaatggaaatgccccatccaacagcggtcataatcgctctcatttcaccatagccatctacaccgaaaacagagatgaaataaatttttaagaagctttttaatatgaattgtagaccgaaaaatagcgttaaatattgtagtgctggataaatacgactatcacgataaagctcacgacttttatcacggtcatggccttgcagtgcggcaatatccgcagcgaaatataacataagtggtttctttataaaaattgtacatatgacgataataccgagtacgatgtgataatatgcatcattccacaacattcgttcagctgacccagataataaatctaccgttgtattagaaatgagtgtaattaaaataaagaaccctgtcacgttaaactgtttttcttttttaaaggtatacagtgtataaataatccccggaacagaggaaagtaacatcgcgtaataaggatcgatataaggttttgcaaatttccaaatgaggaatgggattacgagataaaagacaagatctaatatagcttttttattttgattcatacaaagcctccttaagtcatacatatattttataatataatttctgaaaattgtataaggtttaatgggaaaagaaaaaatatatcaattttcgaggggagagtagattgaaaaaaattgcccctagcgtagtaagtttttttagtatataataaaggaaacgctttcatttttaatttgttcacaaaatggacggaaaatcacatatttactatcgatatgttgctttataatgaaactaattaaatatacatgcatacaatattgtgaaataaataacataaataatctatataaatgtaaacgttatcaaaatagagaggtggagacaatgagtaaatttttcttcaatcataatccagcaacagtagaggatggaaggcttgttaaatatgctgaaattatttatggagaaggtggccgttctgtattagaaaatttaatggtgaaggcatctatcagattgcgtgatcgttatccgaataaatctgacgagcagatctcgaacctagtaaataaaggcatccatgatatgtttcaaaaatatgtgagcgagtaagagtggccaatggctgctcttatttttttgtataaggattgtaactctagctgaaaataaacatgtattctgaaaaacgtaaaaaggagtgggaaagatgagcaatggaattggacgttcgaaagaaaatcttccaactgatgcaaatcatgtgagcgcgaaggatcgtgcgtatcaaaaacgcatggcaaagcaaaaacaacaagagcgtaatgaggatagagaataactcgaaataaagctccttctaaagcagaaggagctttatttcgatagaaaatgattcgcggtaacataaaagagtccaccgttaataatttgcactgtaatacgtggttcatactgttcttgcagagcttgtttttcaatttcatagctctcaggaagttcgtcactttcttcataaaaacggtttaaaaggtctaaatcatgattccaacgcactcttgcttcttttgcccacgtatggtcatcttctgcaattatattttttaaagcgtcttctatgcgttgtaaaccactttgaggtttaatgatgggcgagagcgtaaaacaaaaatcaggtatttttggtgtaagtttaatgtttgttaatgtttcatgaaagtttgccatcattgttccagaaatgagatgaataccaatcgagtgaaggatgtctttttttcgatcacattgataggaaacttttatattaataccgagccaagggtggagcggtgtatgtgttgacccattatgtcttacatcctcatataaacgtatgtatgagcctaattcttttgtcgtttggaaaatttgatgtagacgtggtgaaccgtagtgaataagctcaccatcattttcttcattttctggatttgtaataagagtaaggcgcatcggattcggtacgcctcctgttttctcaagatagtgccaataaaaagggcgattcattaataatttatccatctcaattgttaactgtacatctaataaatgaggagaacgttctaaaatttcacagttattcgcctcaaagaaattgtataagtaattatgaatttcatgttgctgcatagccttgcacctcagcttcatttcgtttcgcaaagtcgataatagatgttaagttttccatcttaattctaatttcaccttcgctctttgattgcgcgaaaatttcttgaatgtgcgcgtcgatgtttttcatattaattctcgttaaaatttcatcgagttcaccaataacacgctcgaataagttgattttttcatataacagtttcagaatatgttcttcaacagtatgctttgtagctaagttataaatatgaacatcatttttttgaccgagacggtgaatacgtccgattctttgctcaagacgcattggattccatggcaaatcataattgatcatatggctacaaaactgtaagttaatcccttcaccaccagcttcagttgcaattaatacttgtgcgtggttttggaaaagctccttcatccaatctttcttcccgcgtttaaacccgccgcggaatggaacggaagaaataccgtgttgttgtaaaaaccattgtaagtacatttgtgacgctcgatattctgtgaagataacgactttatcgtcaatttcttttataagctcaagagctttatttgcttttgagttgaaaggaatatgattaattttgtccattagcacatcgatatgtggatcttttatataatgttcgttttctttctgttttttttctacatgctttttcaatgaatagtaaacagcctcacgactactacacgcttcccgttttaaagttaacgatgagaaagcagatgtgaaggcgtcttgtcctcgccaattttcgatatcattatatagagcttgttcttgttcattaaactcaacaaaaattgtacgtacatgtctcttcggccaatcgataccggtattatgtcgtctatttcgcaccattactttattaatgagagcttttaagtcttcatctgattcggctgagcgatttttggaagcgtaatattcttcaaagttggattgattgcctaaatgtcctggttttaataaagaaacaaggttaaaaatttcatcaatcttattttgaacaggagtagcggttagtaataaacaaaacttcttttttaatcgttgtgcaaattcatagttttttgttttattatttttcagtttatgtgcttcatcgataataataaggtcatattccaagttcaacacgatatcgcgatgtggtgaacgtttcgcagtatcaattgatgatacgattacgtcagcttgttcccatgagtagcttttcttttgtgctacagcgggaatgaaaaactttgtattcagttcgtatgcccattgtgatacgagagaagctgggacaagtataagtacctttttcacaagcccgcggaccatgtattctttcaaaataagtccagcttcgattgtttttccaaggcctacttcatctgctagaatcgctttaccgttcatttgttcaatcacattttgagcgacttctaattgatgcggaagcggtgtgaaatgggataaatgtttcggtgcttgtagtccatcaaaagtaggaacaagtaacgatttttctgtttcataagctaagtgatataaatcccagtttgtccaaggaccatcttcgtcaattctatttaaaaaattgttttgccatgtccgatctacggaaatatcgacattcattacaactctcccaccttttataaactaaagtaattattttttaatgtatgatgatttgccttaaaagaaggcataattatcgttattaaaggctatatgatagacaataataaagtattaaatctcaaaagctgtatttattgtgttttaacataaaaaattctaaattattttttatgctagaatattgatgaaatatagcgaatgatgttaggataatggtgtgaaatgtgtggaatctttcgtattttatccaagaaagtgattttttatttacgctttcataaaaaaatataatgagattccgtatatcctatcttttcagaatgaaaatgtttagaaaagggaagcaacttttattgatttgtcaaagcataagggggagagagcatgattacattacaacgtacaccgttatttgatgtatacgcgaagtatggtggaaaaacaatcgacttcggtggttgggaattaccagttcaattttcaagcattaaagaagaacacgaagctgtacgtacagctgcaggtttgttcgatgtgtctcatatgggagaagttgaagtaaaaggtgtagatagtttagcatttttacaacgtgttgttacaaatgacgtatctaccttaaaggtagggggcgcacaatatacagctatgtgctacgaaaatggtggtacagtagatgatttattaatctacaaacgtggtgaagaagactatttattagtaatcaatgcatcaaatatcgagaaagattacgaatggttagcaagtcatgtaattggcgatgcgacagtagtcaatgtttctagtgaagttgcacagcttgcaattcaaggaccaaaagcagaaggcattttacaaaaagttgtgtcagaagatttgaaagaaattaagttctttaaatttaaaaacgatattcttgtagatggaattccagcacttgtatctcgtacaggttacacaggtgaagatggattcgaaatttactgtaagagtgaagatgctgcaaaactttgggagaaacttcttgaagttggagcagaagagggcttaaaagcatgtggtttaggtgctcgtgatacacttcgattcgaagcaacattaccactttatggacaagaattatcaaaagatattacaccgattgaggctggaattggctttgcggtaaaaacaaataaagaagcagacttctttggaaaagcaacgttaaaagagcaaaaagaaaacggtgcgcctcgtaaattagtcggcatcgaagtaatcgaacgtggaattcctcgtacgcattaccctgtatttattggtgaagaaaaaattggggaagtaacgagtggtacacaatctccaacgttaaagaaaagcattggtttagcactaattgatgtaaaatacgcagcagttgatacagaagtagaaattgaaattcgtaataaacgcgtcaaagcagtagttgttccaacaccattttacaaacgttcaaagtaacggggagaggggtagatttcatgttgcatcgttatcttccaatgacagaagaagacaaaaaagaaatgttacaaacgatcggcgttcaaacgatcgatgaattattctctgatattccagagagtgttcgttttaaaggggatttaaaaattaaagaagcaaaatcagagccagagcttttaaaagagctatctcaaatggctagtaaaaatgctaacttaaaagaatacgcttctttcttaggagcaggcgtatacgatcattatgctccagtaattgtagatcatgttatttctcgctcagaattttatacagcttacacaccataccaaccggaaatttcacaaggggaattacaagcaatctttgaattccaaacaatgatttgtgaattaacaggaatggatgtagcaaactcttctatgtatgacggggggacagctttagctgaagcggcaatgttagcagctggccatactcgcaaaaagaaaattcttgtatctagcgcggttcatccagaatcaagagcagtacttgaaacgtatgcaaaaggtcaaaatcttgaagttgttgaaattaatcataaagatggtgtaacagatttagacgtattacaaagtgaagtagatgatacagttgcttgtgtaatcgttcaatatccaaacttcttcggacaagttgaaaaattagctgatattgaaaaaatcgttcatcaacaaaaatcattatttatcgtttcttcaaatccattatcattaggcgcattaacaccaccagggaaatttggtgctgatattgtaatcggtgatgcacaaccattcggtattccaacgcagtttggtggaccgcactgtggttactttgcaacaacgaaagcatttatgcgtaaaattccaggacgtcttgttggacaaactgtagattcagatggtaaacgtggatttgtattaacgttacaagcacgtgaacagcatattcgtcgtgataaagcgacatctaacatttgttcaaaccaagcgttaaatgcactagcagcttctgttgcaatgacggcacttggcaaacaaggtgtgaaagaaatggcacgtcaaaacatttctaaagcacaatatgcaaaacgtcaatttgaagcgaaaggcttcacagtaacatttgctggaccattcttcaatgagtttgttgtagattgcaaacgtccagtgaaagaagtaaacgatgcattattacaaaagaatattatcggtggttacgatctaggccgtgattataaagagcatgaaaaccatatgcttgtagcagtaactgagcttcgtacaaaagaggaaattgacacacttgtaaacgaaatgggggctatccaatgaagaaccaagaccaagcacttatctttgaagtgagtaaagaaggacgcataggatatagcttacccaaattagatgtagaagaagtgaaactagaagatgtgtttgagagcgattatattcgagtagaagatgcagagctaccagaagtatctgaacttgatattatgcgccactatacagcactttcaaaccgtaaccacggtgtggattctggattctatccacttggatcttgtacgatgaaatataatccgaaaattaatgagagtgtagctcgtttcgcaggatttgcaaatattcatccgttgcaagatgaaaagacagtacaaggtgcaatggaattaatgtacgacttacaagagcatttaattgaaattacaggtatggatactgttactttacaaccagcagctggtgcacacggagaatggacaggtttaatgttaattcgtgcataccatgaagcgaatggtgactttaaccgtacgaaagtaattgtgcctgactctgctcacggaacgaacccagcatctgcaactgtagctggttttgaaacaattacagtaaaatcaaatgaaaatggccttgttgacttagaagacttaaaacgtgttgtaaacgaagaaacagcagcacttatgttaacaaatcctaatacattaggtctattcgaagaaaatattttagaaatggcagaaatcgtccataatgcaggcggtaaattatactatgatggtgcaaacttaaatgcggtattaagccaagcacgcccaggagatatgggatttgacgttgtgcatttaaaccttcataaaacatttacaggtcctcacggcggtggtggcccaggttctggtccagtaggtgtgaaagctgatttaattccgtacttaccaaaaccgattttagagaaaaccgaaaatggttatcacttcaactacgaccgtccagaagcaattggtcgtgtgaaaccattctatggtaacttcggaattaacgttcgtgcatacacgtatattcgctctatgggtccagatggattgcgtgcagtaactgagtatgctgtattaaatgcgaactatatgatgagaagattagcgccattctacgatcttccattcgatagacattgtaaacatgaatttgtattatcaggtcgtcgtcaaaagaaacttggtgtacgtacattagatattgcaaaacgtctgcttgatttcggttatcatccaccaacaatttacttcccattaaatgtggaagaatgtattatgattgagccgacagaaacagaatcaaaagaaacattagatggtttcattgataagatgattcaaatcgctaaagaagtagaagaaaatccagaagttgtacaagaagcaccgcatacgacagtcattaaacgtttagacgaaacgatggctgcacgtaaaccagttttacgttatgcgaagccagctcctgtacaagtttgattaaaataacaaaagaagaactcgctgaggcgggttctttttttgtatggataatttgtcccgcattaacggacagtaaactctcaacttaaaacttagctgctgcaaagaagacaggtgggagataaactgtccgtaaatgcccgattggttcaactaataatcagtggggatgaacaaaaatccccactgattaaagtttcactttatgcagaaatagtgaagaaaatgttaaaaaaatatgttttttgtttcctaatggtgtaaaggtgtagttttataggtagttttgttgaaaaagtcggtttgataaaagtatttatttttgttagaattttattgaaattaagaagatgtgatgaggcaaagattactcatttttatgtatatgtgaaaaaacgaacaagacgggggtgaaagtgtgggatatcgatgttatagaatggtataccatttagaaaatggagaaacaattaaagatgtaaaagaattttgctatcgagaccaaggaaaagtgttagaaagagtagcaaatcgtgtaatggataatagagaagtgacggcgattgataaacaaggaacaatcatttcaatagcatgtgaggacattgtaaaggtggaacttgattacataacagaaagttaaccttgagtcatatcgaattattcgataaaataaactgttgaatggtgaagtgagaagagaggagtttatcatgggtagtacaagacacttttatatgtttatcttagcgtttgttcttgttgtggcattaacgatttacttaatcgttgacagcagctggtacaacacagttcatccggcattccttctgtttatgtatataggaattgcagtagtaagtttcggaatgagagacgagatgttagatcgctttgaaaagtgatacatatacgaaagaccaacaggaaaatgttggtctttttttcttgccaaaaataggatggtgtgtatatactgtatatataaggtatacacagtatatacacaaactggaggaaaacatgaatattattatttcgaattcttcccaagaccctatttatgtgcaaataagaaaacaattaagccagcttattttaaatggcggtttaaagggtggagatcaattaccgtctattcgtagcttagcgaaggaattacaaattagtgtcattacaacgaagcgtgcatacgaggagcttgaaaaagaaggatatatagaaactgttgctgggaaggggacttatgtttcacgtaaaaataatgaactattaaaagaacaaaggcttcgcctattggaaagtaaagcggaagagattgtgaatgaaagtaaagcgttgcagctttcacttgaagaattacagcagatgattgcgtttttatataagggggaatgagagagatgttagagttaaaaaacgtttgtaaaagttatgaaggtttcgcagtgaaaaatataagttttacgttaccacgcggatatattatggggtttgtcggaccgaatggggccgggaaaagtacgacgatcaaaatgattatgaatttaattaaaaaagataacggagatataaaaatttttggcaaggacaataagaaagctgaaaaggaaataaaacaaaatatcggctttgtatatgatgaaaatcattattacgaagatttaacgtgtgaacaaatgaagcgtattattgcaccgttatataaaaagtgggacgaagagcagtatcaatcgtatatgcatagattacaagttccaaagtataaaaaaattaaagaattatcaaaaggaatgaaaatgaaatttgcgattgcaatcgcactttcgcaccacgcagagtttattattatggacgaaccgacagcagggttagatccagttgttcgaagtgaattacttgatatgttgcaagaaattgtaatggaagatgaagtatccgtattattctcaacgcacattacaacagatttagagcgcattgcagattatgttacgttcatcaatgatggagaaattatatttactggtgaaaaagaagacttaatggagaactacgtaatcgtaaaaggaagtaatgatttattagaccgagaaggaaaagaactatttgttggattacgaaaaaataagtttggttttgaaggtttagcgaaggataaacaaggaattatcgattggtttggaaatgaggttgtactagaaaaggctacattagatgacattatcgtttacactgcgaaagggagaggtgtctatgcgtcagctaatctataaagatttgttcttttttcgggttatgtggttagtgtattttattatgcctcttgttttctttggattagatccagatggtgaattgttatttccaatgagttgcttactcataacgatatcatcttctatgatactaatagcgatggatgaaaaaaataaaagtgatgttattataaatagtttacctgttggacgaaaggatatcattattgctagatatatttcgggtgtaatatttattgtaggtggcatgatttctactacgctagttgtttttcttataagaggtatcgctgtcattggtgatattggagcttatcatcccaatttgtatattgaaattccttggtatgtagtagtcagaggtgctgtatattctttagtttatattacagcattattcccgagttattatgggacaaaatcaaaagtagtacgtggaatatttacaggtggagccgctggaataggtgttattgttggaatgtttattggtgacggagaaagtgctacggcatcattcattgattggattatgaatccattacattttggcatatttatagttggattaatcacactagctagtgtctatatcgtttctatgcttcttacaattaaaatttatgaaacgcgtgatttatagagaggagaattcatatgcaacagttgattttgaaggagttttttttacagaagaagatgtttcctttctattttttaatccctattttatctatttttaagaattccgtcgaaccaatggggattgcaataggagtatttataacatgtagtacgattatatatatttctttttattatgacgagaaaagtaaagcagaaaaagtattagtgagtttgcctataacgagaaaagagataattatagctaaatatatttcaagcacattatttattatggctggtttgagtgtaacttttatagtcgtaatattaggaaatattttattgaacagagatatagttatgcctggatatgcaatattttcagcaatagtagcaactttgatttattgtgcagtaacgataccgactaattacattgggggatataaagttattactgtcttgaatttgattatgctttttcctttaatgggtatgattggtcttatgtgcaatatttttggtgataaaacaattatgttaaaagtacttcactctcaagaggctacacaagcaatgggtgttcttggtgtcggagtattagtgagtatattcgtatcattgttcctctcaatgaaaatgtttcaggaggcagagttatagaagggacattttcatattaggaggtgtaatacatgatcaagcaactaattttaaaagatttcatcattcaatggaaatttttaatttggtacatactgtatcctgttttcttttatatggccttaacagatacggaaaatttattcatcattatgtcagtaattattacaattggggcaacagtaaaaacatttgaagcagatagtaaaaatgagagtgaagttatagtaaatagtttaccaatattgagaaaacaaattgtgtatgcgaaatatatagtagcaattattattctttttataagtgtaacggtcagctgtttcacgatgggaatgaagaatgggattaacctatttgaatttattgaaacgacattgcttgctagtattagctttattttagtgtatttaagctttgttctaccaatatctttttggttaggatataaaaaaactattcttattacaatagtaatattcatggcgccgattgttattttagaaactttgtttcaaatcaacttggaacaaattcaattatataataccttgttattcattggttcaatatgtatgctcatagcatctatcttcgtttcagtgaaattgtatgagaagagagaattttaaaaggtgccctataaaaggcaccttcttcaataacgacaatacgagagcagtagtttataaaaagaaacgctatttggcacatctttcggagtatgtaatataaagctgaaaacgatgatgagaataagaaataggaaaaataaaaataggatttgcttatgtatagaattttgcatattatccactcctttttttgggtagtatgtccaaaagaaaggaatgtatgaaaaaaattggagggggaacaatggggaaacgaaaattgttatttgaaataggagtattatttttgtcaataggtcttttgttatcaaatttttattcagacataccatcaccgtttcctaatttgcataaaggaattggtataagtattgttataattggtctgttttgtcttatcacatctaacttctacagaaagtctgaatgaatataaaaaaggacagttactctttttcagaagtactgtcctttttaaataacttattccatagtttggcgatactccatataatgacgattgcaatggaggcgataatggaccaaacaatcgatataatttcaagtgtcatgttaggaaggaatgtgagaatggataatactttatgaaacaatgattctattatatgaaaacttatttgtaatagaatgacgatacaaagtgtgatccatgctaatattttctttccttgttctttccacatgacattcacctcacgttagcttaatagttttaagccaacagcgccgcataaaatgcagcttaagaaagcaagacgacgccaatccgctgattctcggaaaatgagaatgcctagaagtgcacttccagcagttccgattccagtccaaattgcgtaagcagttcccatcggtaatgtgttcatcgcaagagataagaagaagaagcttacgccgaagttagcgattaaaataacttttggtgcccagcctttcttttcagtggctactttcataaagagtacaccaataatttcacaaataccagctagaattaaaaatacccaagccattttatgcggcctccttcgcttctttttcttctgttactcgttttaaaccaattactccgaagaagattaaaccgattaataaaacttttacgatagagaaaggttctccgaagatgaaaatctctgtaagaacgattccaccagctccgattcctgtaaagactgcgtatacagtgccgacaggtaaatctttataagctctaaataataagacgaaactaattgtaattaatagagcaacaccagcccattcaagtggtgcctctgctttttttagtccaatcacccaaaagatttcaataataccagcgatgattacataaatccatgccatatgtcatttctccttcctaccagtcgttaggtaaagggcttaaaaacgacgcattgcaaagggcaatccgtcagtttgaaagtccgcgccaaaatactttccaagaagcgtctaaacgtgtctcaaaacgatttaaacctgcgtataatagttcaaccataagaccgtcgagtaagcatagaaaagcctctaaggcgtcttttacttcaatgttatgcagctcatcttgttcgcttgctcttttaaatacagggaataaaagttttccgacgttttcaatgtgtacatttgctttattaataatttgttcgcgaaatgcatcaggcggaaaataagaagttcgtaaccaaaacattgattcttcactttcaccaaatcgttttgcatacccttttaataattttaaaagcaattcttcagtggacgaattggaaaagctttcgatatcgcctgtgaagctctgcaaatctttttgaagagcagattctaagcatatgaaatatagctcttcttttcctttaaagtgtgcgtaaatcgatggttttttaatcccaacttcttgagcaatatttgccaatgaagttccttcatagccgtagcgtgcgaaatgagaaagtgctacagctttaatgcggtttgctgtcattttcatcccctacctaccgttcgttaggttaattatatgagatgaaaaatataatgtcaataggtgaagagttgaaaaagagcgttataggtaacgctctttttagacagtctctcgctcaattaaatggaatgaaagttcttttgcactgccgacaatttgctcgctttggatctgcttatggaataaagaaaaagcatgtgagcccattgcgagaccgggatgttcaattgtggaaatttctaatgcctttgaaatttcatgattatcaaatccaaggatagcaaggtcttcaggtactcgaataccatgttttcgagcctctgttaataaaccagctgcaacttgatcgttcgctgtgaaaatagcagttggacgatttttcatatttaaaatatgatggagtatttgtgctccgtcctgcattgtatagcattggtggaaaatccattcaggatgcaacgttttcccttcgttacgaagtgtatcggcgaacgctttttcgcgctccatggaatttacacttgtttttcttgctaaacaaattccgattttttcatggcctctacttagtaaataggcagtaccgagacggaaaccttcataatgatctacgtagatggatgaaatgaggggatgcttcattttttcacatgaaataataggggcaaattttgcaaaaggttcgatttgttcccaagagctcgttcgggagcaaataatcatcccatcaaattgtttcattttcatcatttcaagaacacgaatttcttcaatgctatcgtaattcgtttgacataaattaatgtgatatccggcagctaacgcttcgtttccgattccttcaataatcgtactgaagtaggggaggttaatgaaaggaagcataacgccaattgtatatgttttccctcttattaaatggacagcatttatattttttgcgtagtttaattcttcaacagcatctagaacacgcttacgcttttcttcttttacgtaagggtgattattcaggacacgagaaacagttgatatcgatacaccagcagttttagcaatttgttttatattggccatatgtatcacctctttcccttattataaagggaaaataataagaaagaaaaaatcttgacctgaaaagcttttcacaaactatggtattaataagacttctttttattcgcgtaaccttttcacttgggcgtaagaatgataggggtcttttttgtttgcaaaaagtgttgtcaaaatgtgtgagaataacgtggaaagttttcaaaggtggagtttggtgacaaagcgaatatgaagagaatatcaacgcttcgttcgttaagagagcggtatgaaagggcggaaacaaattgaaaaaaagaatcatttgtttcgtgttttctagtttcatgcttagttcgtgttcgtttcagcaaacgatgcaagaagaaaaacactttgtgggaacaacaggaggagctatggatcgtgttacggatcctattccgctaaaggaacttccaaaatattttccggtgaagtttaaagttccaacgtttttaccgtacgacattacaagtgatgtgaagggggaagtaagaacgcttgggaaaaagaacattgtcttaacgattaaatataaacagaaggagtcaggtagaaatgagtatattgagttaaatgtcgcgaactttccttatagttttccggatcttgtggaagagaagcgatttcaagaacaaatgaaactgaataatggaacgtctgcttattttaaaaataaagatgattatgaacgtggtgacgaatttgctacgcttatatggaaagagaaaggaattgaatatcaactgctgtatcggaatgtagaagagaacgatgaaaaggtaatcaagcagaatttattatacattgcgaataagatgaaatgaaaaaactagctgatttattcagctagttttttgtatgttattatttctttttaattttgcctgtccaagatttaaatccaccttgtaattggtagaaatctttgtagccttgtttttttaagtattgcgctgcacgacctgtacggaatccgctttggcaatataagtaaacaggttgatcttgacgaagttctttatggcgaaggcgaatttgtgataacggaatgttacgtgcacctaaaatatgccctgcgttatattcgtctgcttcacgaatatcgataagctgtgctttacggtaaccagcgcgaaattcttcttctgtaagagttttaattaattttttctgatagaagtacatccatacagtgtagccgataaatgctacgattacggctaataaaataatccaagttgttgacacgattctatcgctcccttttttcttatcctactttcaatattataatgcccttatgtatttatgcaacagattcatttgcatataagaagaaatttcgtattctttcacaaattttgtcgaatttggtagactagagaatgtgaaaaataattggttatatgaggtgcaggatgggaaaagaaaaatggtgttatattaactctggtcaatgttcaccggcatttaatatggcgttagatgaatgtttattaaattggcaaagtgaaaagaaaatgccaccaacaattcgtttttatgaatgggaagtaccaacattaacagttgggtattttcaacgtgttgaaaaagatattaatatggatgtagttaacgaaaagaaatatggattcgttcgtcgtcaaacaggcggcaggggtgtactacatgacaaagagttaacgtatagtgttattgtgtctgaagatcatccgaatatgccgaaaacagttacagaagcgtatcgtgttatttcgcaaggtttattagatggttttaaggcattagggttagaagcatattatgcagttccaaaaacagaagcagatcgtgaaaatttaaaaaatccacgttcaggcgtatgttttgatgcaccatcttggtatgaaattgtagtggaaggacgaaaaattgctggtagtgctcaaacacgtcaaaaaggtgttattttacagcatggatcgattccattagaaattgatttagatgaactatatgatctatttttattcccaaatgaacgtgttaaggaacgtatgaagagtatgttctcttctaaagcagtagcaattaatgaattaacagaccgtacatttacgatagaacagttaattaaagcgtttgaagttggctttgaaaaaggattggatgtagaacttgttccatatgaattaacagaagaacagttacatgaagttcaaacgttagcgaaagaaaagtatgaaagtaatgagtggaattataaaaaataagaggtggcgatagccacctcttatttttttatagtaaattaagtactttttctactttgattcctttatcttgtaaagaacgaaggcgacttacaacgtccataatttctttgtcaaatgtaacgctaataccttggctttgtagttcttcttttaagctttcaatagaatcatctatgtcgatgccaagctcgtaatcttgacaaacttcaattgtctttttcacgagtttaacataattttcttgtagttttgaatttgtttcagtcaaagcaggctgcttcggttttgcaggagcaaccggtgctgtctcttgctttgtaactggagtagggactgctttttttacaggcgctggagtaactagttctacagctgcttctacgcttactggcttcggtgtcggtaccggagtaggcttaggtgccatagcaggtgtttccacacgcgtaacaggcttaggagcaggcgtaattgcttttggagcttctacaactacttcttttttcggtgctgcttctacctgtgtttcttcttgctcggcagcttctttattttctttactccacataacgcgttcaatttctagagaaacattgtttttgttcatcgctgttaatgtaactttaccaacttcagcgtttccagtgaaatcaacaattttataaataacactcttgttccaatccacgtttccgctcaaaaataattcttcgttacatttcggcgttaagccctcgattttaatttctgcgtttacaccgttttcactatataccataattagcgaagcatttacatcttcgtctgctaacattagttcacgtaccattttgccggtgcgtacttgcgttttcttcttaactgacatctaatttctcctctcaaaaattcagtaataataaaaaaatcgtataacgaaaaataattgctcacgaagatttatgataccgataataaaagcatcacgtcaacaattaactttaattattttgcatttttcttattttctttatgaaatttttcaatttgtaaaattagacagaagaaaaaacagccttttgaagggctgttaaaatttagatgttttatataaaaatttgtacaaaatataaaaagaaagtgtaataagagcaccttgcaaaatagacaagttataaaataagtatggttttgttttgaaaaatacgtttgcaaaaactgataagacaaaaggtataaataccgataataagagaagtgctttttgtttccaggaaactaatattgtaaaagagaaacgtctaaataaagaaaaagttatgaaagcaccaattgttaaaacaatagcagataatattgttccgggaatactaaatggaattcctgaagtgtttgtatttgaaaatagtttttgcataagagtagtgaatgtatcgtatccaatttgaacagctaataataaactaactgcaaacccaataacggcagcttgttggaaagaattttgatgttccgaagagttaattaattcatcgcagtaagcttttaaatcctctccgaaaatatcatgcgcagttttaccgtcttcttgcgcttctaaaagatgatccaatatttctaaaagtaattcttccatttgtttttgtggaacgctagtaaggcgtaaataaataagcatatcaccataagcagcttcgttttcaggtgttaataactttctttttttattgtttaactgaaccatttctttttcagtcatgacctcgtcactcctttttaaagtccaagtattcttttttgaagaaaagtttatatagtacatagcaagagatggcaagcaaagtaccggtccaaggtgaaacttgtaatgtagtatagggattttttataaataaaaaggaaataccgattaatagcatccataggctatgacgtattaaaaagcttcctatatgcctccaaatagttgttttatttttaaataaatcagtgttaataaaatcgaagacaaaacgtatcataagatgtacggataatgtaaatacaagcagataaatgaaatcaatgtgtacaaatttaaaacgtgctttatctgcaaataagggtaatacaaatgcaattacggacgaaatagcaaagtatattgctagcaggtaacaagttataaataaaggaattgataattgttcccataaactttgcttcggtagggcggcaattaactcgtcacagtacgcctgtaagtcgtctccaaaaatatcataagcatttttttcttcttgctgggcttcaataaggtgatctagaatttcaattagcagttcttctgcgtggtattctggcactttagctaagcggatgtatattaacatgtcactataggcgatttcattttctgtagttaataatttacgcttttggttatttaattcgattaaatctttcgccttcatccccatcactctccttgtaataaattgtttacggtcgttgaaaccatcccccagctttgtttaaattcttcaagctgttctaatcctttatcggttacgtgataatattttcgcttcggaccgagtgaggaagcttttaatgtgccttcgatcaatttttctttttgcatacgtaataataacggatagatgcttccttcgcttacgaatgtaaagccatgtttatttaattttgtgctcagttcatatccgtacacttcttcttgtgaaatgatgtataggatgcaaccttctagtacaccttttaacatttggctgtgcatgatttcaccaccttttactcaggtaacttgcgttgcaaggtagctgttatccaaattataacccccagtaacttgcaacgcaagttactggggggaaaactttaatgtcccccatactaacgagagggcgaaaagcatatgagaccatttatgccaaagctcgtttactttgaacgaaaggcacttgaatatccacttgattttatagttgcgccaatttaaatgcatgaagaatgggaagaaggaaccgtaaactatttgagcgacaaagatatgacaataccaaatttaacgtttgaattgattcagcatcgttttccaaaaccatcggaaaatatgtatataaaaaggatgatgcagcagtattggaagaaacgataagaggttatataaatgagttttttcctaatgcagaaatacaatattttacttaagggcggtctgtatgcaaatacagattcttttttgttttatatatttaggctcgttttcaacttgtcacgttattctttctggtgtatcattttattgattgcttcgtacggaataagcaaaatgaacttggatggaggaaaccgatgcctacccctagtatggaagattatattgaacaaatttatttgttgattgatgaaaagggttacgcccgcgtatctgatattgctgaatcgcttagtgtacatccatcctctgtaacaaaaatggtgcaaaaattagacaaagatgaatatctaatttatgaaaaatatagagggcttgtattaacaacaaaaggtaaaaaaatcggagaacgtctcgtatatcgtcatgacttgctagagcaatttatgcgtattatcggtgtggatgaaagtaaaatttacaatgatgtagaaggaattgaacatcatttaagttgggaagcaattgatcgcattggtgatttagtggaatactttgaacaagatgcagtccgagtggaaacacttcgtggtgttcaaagagcaaatgaagagaaaagtaattaaggggaacgtatggcgtttccttttttatttcaattcgaaaaggatgggagaattatgaaagcaattatttttgattttgatggattaattgtggacacagaaacgatatggtttcactctttcagagatgctgttcgtgaatacggcggggaactacctttagaggaatttgcgaaatgtattggaacaacagatgaggtactttatacatatttaaatgatcaattaaaagagaagtttaacaaaaatgcattaaaagaaaaagtggcaactttacataaagagaaaatgagaataccagaagctcgtgacggggtaaaagaatatttagaagaagcgaaagaaatgggattgaaaatcgcactggcttctagttcgtctagagaatgggttattcattttttagaagagctacagattcgagaatattttgaagtgattaaaacgagagaagatgttgagaaggtaaaaccagatccagctctttatcgagttgcaatagaagaattaggaattaagccgtctgaagctgttgtatttgaagattcattaaatggattgagagcagcagttgcagcgggattaacgtgcgttgttgtacctaatgatgtgacacggaatttaccatttgaaaatcatcatcttcgaattgaaagtatgagagagaaaagtttaaaagaagtgcttcaaagtataaaaaaagaccgtatttcctaaaaggaagcacggtctttctttttgctttttttgccttcaatgacagttaaatgagactgttttctttttcgtttcaaagtggaagaattcccttttttacttttgtcattagaagtatttgacttaaagaaagaattgcctaggggtgctacattttgtttcccatgtttgcggttcgattgttttgccgcacgcttatatgagctttgtgaatttgcagaaccactggaatttgtaaacatcttgtatagcaagtaaaagataccaacaacaagtaacatgtacccgatatttcttaatacacccatgggatttgtaataacagatgaaacaaggccgaatattgccaatccgataataagcacaaatatagcgaaagtaaacgaacgaccgttcataagggacacctcctaaaaacgtatattaaaattagtatattaacgatgaggaaaggagttgaacaccatttttaaataattattgtttgttctctaaacgtaataattcttcaaacgatgcaattgctacttccacttgatcatctgttggttctttcgttgttaatagttgtagccataatccaggatatccaagtacgcgtaatacgggaatatctcgtaatcgatttgtgaattgtagtacttcaaaagaaataccaagtacaactggaattaataaaattcggtttataactcgtgcccaaagaggatctgtagggactaggaaataaacgaacattccaataatgactgtaaatataataaagctactgccacatctataatggagacgagtttgcttttgaacgttttctacagtcagaggaaggttattctcgtaagcattgattaccttatgctctgcaccgtgatactgaaatacccgcttaataagtggggttaaagaaataaagtatatatagctcaataatagcatgagcttaatgacactttcgacaatgatttgcccagtatgagacgggaaaatcggtcttgttaattcagctaatagtgcaggaactgctgtgaaaatgactttaccgaatataaaagataaaacgccaacagctgcaactcctaataccatcgttaattttgattgttcttcttttttatttgcaatttgttcatcatcttctgggtggacgtcaaatcgttctgaagcgaagtttaaatgctttgctccattcgcacttgcatccacaatagcggcaatccctcgtaaaaatggaattttttttagggtagatagtactttattacgaacgcgtggtaatcgataaaattcaatcgatttatctttacgacgaaccgctgtaacagtatattctctaccgccaaacataactccttctatgaccgcttgcccgccatatatttgttttgactcttctgccatgttaacaccaacctgtatttgtttctctcttatgtagaaaaagaggcaattgtcatactgggttctgtcgttttgaaataagacaatcaccgagtttcctttattttatcggcaaatacaagtagatgacaagggaaaatgttatgagagtcggacatttcttattctttttatagacaaatttcgcaggatttaaacatgcttcaaaatagtttcgggcatactattgagcggaggtgtcgatgtgagtcaagaacaattaggaacaaggaattttgtgcagattggtttgtttggtggaatcttttggggcggggtatggtatttccttcatatattttcattcacggaggcgggcccgaattatttccttttaccatttgcgtttggaagttggaaagagggtgtatggggcaatgtgttcggaatagtgtgtatgggacttctttcaattttgattgcctttttgtataaagcattttttgcaaagtttgaagggattatagcgggaattatttatgggctattttggtgggcactactgtttttggggatgggtttaatggctcctgttattaaaagtgcgctccatttaccaaaagagacaattgtgacgacaatatgtatttttatattgtatggtgtgtttatagcatattctgtttcttacgcagtaaatagcaataaagcagaacaagaagggtaagagaagacgaactattcaaataagtaactcctatgttaaaatattgtatagatatttaatattaaggagttttaagaatatgaaaaagttactcctcgtaaacggtcctaacctaaatcgcctcggtgttcgtgaggtaaatgtatatggaaagggcacgctaacgacacttgaagcagatatgaagcaagaagcagaaacaatgggagtggagttagaatgtttccaatcgaatcatgaaggtgccattatcgacattattcatgaagcggaagatatatatgaagggatcattttaaatccgggagcatttacgcattatagctatgcgattcgtgatgccattgcgagcatttcgattcctgttattgaagtacatatttctaacattcatcagcgtgaatcgttccgtcatgaatctgtgacggcagctgtttgtgcaggtcaaattgtaggatttggtttttatggctataagttagcgttatttgcattaatggagaaattgagggaggcataaagtaatggagaaaattgaaagattacgaagtgcatttgatgaggctggtattgacggtattttgttaacaaatgaacatagtcgtagatatatggctaacttcacaggaacagcaggcgttgttcttatttcaaaagatcgtgctcaatttattacagatttccgttacgtcgagcaggcaagtaaacaagcggttggatatgaggttgtacagcacgcaggattgatcattgatgaagtggcaaagcaagtgaaagagcttggaattcaaaagcttggttttgagcaagatactcttacatatagttcttattcagtgcataaggaagcgattgatgctgaatttatcccgacttctggacttgtagaaaagttacgcttgataaagactgattcagagattaagatattaaaggaagctgcacagattgcagatgctgcctttgagcatattctatcattcattcgcccgggagtatctgaaattgaagtgtcaaatgaacttgaatttttcatgagaaaacaaggagcaacatcttcttcgtttgatattatcgttgcttcaggtcttcgttcggcattaccgcacggcgtggcatctgaaaaagtgatagaaacaggagatttcgttacattagacttcggcgcttattacaaaggatattgctctgatattactcgtacgattgcagtcggtgaaccatctgataaattaaaagaaatttataatatcgttttagaagcacaactacgtggtgtgaacggtattaaagctggtttaacaggtcgcgaggctgatgcgctaacgcgtgactacataacggaaaaaggatatggtgaatactttggacactctactggtcatggaataggtcttgaaatccatgaagcaccaggtttagcgttccgttctcatacagtacttgaaccaggtatggctgtaacagtagaaccaggtatatatattccaggtattggcggcgtacgtattgaagatgatatcattgtgacaagtgaaggtaatgaagtaattacgaaatcaccaaaagaacttattattttgtaatacacaggaggatttttttacatgatttcagtaaacgattttcgtacaggtttaacaatttcagtggacaatgccctttggcaagtacttgatttccaacacgtaaagccaggtaaaggtgctgcattcgttcgttctaaactacgtaatcttcgcacaggttctgttcaagagaaaacattccgtgcaggtgagaaagtagaaaaagcacacatcgaaaaccgtcgtatgcaatacttatacgcaagcggtgaggctcacgtatttatggataacggaacttatgagcaaatcgaacttggtgaaaaacaaatcgagcgcgagcttaaattcctaaaagaaaacatggaagtagcaatcatgacttaccaaggcgaagtacttggtgttgaacttccaaacacagttgaattacaagttacagaaacagagcctggtattaaaggtgatactgcttctaacgtaacaaaaccagctacattagaaactggtcttgttgtacaagtaccaatcttcattaacgaaggcgaaatgcttatcatcaacactggtgaaggtaaatacgtttctcgtgcatagtaaaaaagcactcgtgataattcacgagtgctttttttataggaaatagggtagatagtaaatagctgttattataaaactgactaaaacaagtgaaagagtacccataatagatggagtcaaaacaatttgaaatggttttatttcgccagtctcaacgccagttaatgttttacttattgcgtgatctgtaatgttatttctatggttactcataataattaaccacataattgcaaatattgctaaactaccaaggaaaaaggtctctataaatgaccaaccgaccaataatgaaaaaagataaataagagctaattctactacaacggttaaactaactttcaatgccttcatatttttccccctcattctgtaatttcaaccagtttaaaaaattttcacgtgacacgacatgcagagagcaaggtgactttacttctttctctagtgcagcgtgttcgtctggaaacttgttttccacatgcaatgaaatataaggtagtttttcttgtgcttttaaagagcggatattattcgttttagcaccagcaaatacgtaggaaagttgtaagtctaaaaaggcgattttaaagatttcttttttagcagcctcgttatagccttttccccagtacggatagccgagccaactaccaatgtgagattgctttttctcattattaatatgtttaagtgtggtgaggccaattatttcattttcttcattcacaatcattctcgataaggatttcttttgacgctcttcttctattgcgaaaagaagaaatgttttcgtgtcttcgatattttctaccgttatccccaatgcattttttatatgtggatcacttgatagctcgaaaatcacatttgtatagcataaatctagtggtaataaagtgacgtgctgcatggtttaaacctcttttaaactaaatgtaccataatataccatgaaataatatgaatattcagattgtaattcagactttagagaaaaattatgtttttacttctgaaatagacaacctctgcatatggttgtacaaatatattcttttttagaatacgaagttagtaactgttacgggagaaggtggaagaatgaaacagtggctagcggcaatggaaacatccgtgcttgttatgggggcacttcgattattttcaggtagtgcggagatatttgctgctttgcttatgctttatgtgaatgatgcgaagaaagcgttgtttataaatggtatgttggcgtttgttggacctaccgtattaattttaacaatgacaattgggatagcgagtgtagcaagtgaaatttctttcttgaagctcttttttctagcgcttggaatttgctgtatttttatcgcattactgaaatagtaagtcgagtatagtggggagaagccgatgaaagaggtattagaagttttaccaaaaacgatgaagtacttaattgaagaatgtaagcaatacgatgctttagaggaaattcgcgttcgaattggaaggccgctagagtgtattgcacacggaaaggtgtttttttatgactatatcactactgcagaggatgctatttacttattgaataagttaagtcaattctcaatttatacgatggaagaggaattaaaacgtgggtatgtgacgcttcgcggagggcatagaatcgggttagcaggaaaagtcattacagaaaaaagcgcagtgaaaatgattcgtgatgtctcttcctttaatattcgtattgctcgtcaaaaaatagggattgctgaaccgcttttgccatatttgtatgaaaaaaggtggttaaacacgatggtaattggccctccccaaacgggaaaaacgacactcttaagagatgtagcacgttgcatgagtcaaggggtaagtgcttcggaaattccttcctgtaaagtggggatcgttgatgaacggtcagaaattgctggttgtgtgaaagggatcccgcaatatgattttggtacccgagtcgatgtgttagacgcatgtccaaaggcagaaggaatgatgatgatgattcgttctatgagtcctgatattttgatcgtagatgaaattggccgtaaagaagatagtgaagcaattatggaggcagtgcatgcaggtgtccagctttttataagcgcacacggattttcctatgaggatgttgtgagacgtccatcgctcaaggcagtgctagagcttggtatatttgataggtttgtggagttgtcaaaagcgaggggtccaggaacggttatgcaggtgaaagataaatatggaaaaccagtgttatcaaatagaaaggctgagggcgtatggtgaaaatatttggtgcagtgttaatcgttgcggtcagcacctttttcgggttttcgtacgctaaaagatacagtgagagaccgaggcaacttaggttattaaaatcagcacttcaatcattagaggcagaaattatgtatggacacacacctttatctgaggctgccgagcgattagttaaacaaatgccaaagccattaaattggatatttcaaagtttcgctaaaaaactagaaagtggagaacaaacagtaagggaagcttggatagatagtttgaaagagaattggaagttgacggcttttcaacaaaccgagtatgaaatactgcagcaatttggtgaaacgctcgggcaacatgatcgtgaatcacaacaaaaacatattcgcttatgtattacacatttggagagagaagaagaggaagcgaaagctttacaactgcaatacgaaaaaatgattaagagcttaggggtactagcagggctacttattgtaattttactgctataggggggagaaaggcgatgtccattgatgttggattaatatttcaaatcgccggaatcggcattgttttagctttcattcatactgtactaaaagaattgaagcgtgaggatattgcaaattgggttatccttgtcggttttgtcgtcattttatttcatgttgcatttttaattaatacgctattcgacaagattaaaagtgtctttctcttccagtaaaggaggcggttcgaatcgaaattatacaaattgtcggattaggcctcgttgctacgtttttagctgctgttttgaaccagcataaatctagtattacatctttatttattgtgttcgtaggtagcgtgatgtttcttattttaatcgatcaaattcattctattttacaaatgattgagagagtagcgagtgaagcgaaagttagcaacgtctacgtggaaacgttactaaaaattattggaattgcttatattgccgagtttggagctcaaattacaaaagatgctggtcaaggtgccatcgcttcgaaaattgaacttgctgggaaaatcttaattctcgttatggcaattcctattttgacggttgtaattgaaactattctcggatttttaccgacgggataagggggagtgaatgttgaggaggtttggagctaagctgctatttgcttgcttccttttcttttctttaccggttgttgtacaagcttctcctgtagaaacaaacgtcgttgatcaacaattggataagctcggaattgaagatgtgaagcaattttgggacgggcttgttacaaaatatggtggctatttgccagagagtcaaaaagggagttttatggagtttgtaaagggagaaaaagaattctctctaaaagagtggatgatagggttattaaaatatttatttcatgagcttgcagctaatggaaaactgcttggcacactcattatgctcacaatctttagtgcattgttgcaatcactgcaatccgctttttcaaaaagtagtgtaagtaaaattgctgatgctgttgtatatatggtacttattatttttgctttaaatagtttttatgtcgttatgacatatgcaagagaaacgatacaaacaatggtagatttcatattagcgctattgccaattttattggcgcttatagcgactggtggcggggttgtatctgtatctttctttcatccgattatcattttcttaatgaatacaagcgggcttcttatgaattatatcgttctaccgcttttattactggcaacgatattaagtattgtaagtacaatgagtgatcaatataaagttacaaaattgtccaagcttctgcaaaacgttagcgttgggattatcggtatcttcttaacgatttttttaggggtattatctgtacaaggaacagcgacagccgttgctgatggcatagctgtgaaaactgctaaatttgtaacaggaaacttcattccagtagttggaaggatgtttacggaagcggcagatactgttattagcgcatcaggattattgaaaaacacagtcggaattattgggctcgtcattttatgcttaattgttgcttttcctgcgattcaaattttctgtattgcatttatttataaattcgcagcagcagtattacaaccggttggcggcggagcaattattcaatgtttagacattattggaagaagcatcatttacgtatttgcttgcttagctatcgtatcatttatgttctttttaagtattacaattattattgctgcggggaatattacacttatgatgcggtaggaggtgaagagtatgcaatttgttacagagtggatcagaaatattatcgtttttttgctcttagcgacaatgattcatcttattcttccaaattcgaatttgcaaaaatacgttaaatttgttgtaagtcttttgttagtcgtattaattttaacacccctttttaaactattgcagacagatgtaaatgaagtaattgcaaattttaatgaagaaaagtacgtagcagaaggatctgtaaaaaattcaatagattcgaagaaaaaagaaatacaagctctaacacgtgcatatagtttagaagagatggctaccaaaatgaaaaaagaagtaggaaaagagtttgagaaaaagtatggtatggctgtctctgaaatacaaatagtcgcagcagaaaatatagaagaagtaaagtcagcgaaagatattcaatctgttgttgtgacgttgaaagaaaaagaacgtagtaaaaatgatgcaatcgaaacagtaaagccaattgaaattaacacgaaagagcctccaaaaaaagtggaagaaacgaatgtagaaatgaaagatttcttttcaagcaggtggcaactagagggtaaacaaatccaagttcaaatggaagggaggacaggtagagtaaatggacaataaagataaaaattcgaagttctcattttttcgaaacttattgaatggggatcaaaaagaaagcaacgagaagggtaaaaaggtaacacctaagtttttacttgtcctactcatacttggaattttgcttatgttttctagtagtctcttttcaagtaaaaaagaagaagtacctgtatttaaagaacaaaaaactcaaaaccaagaaaaagacgtaccaactttcggacaaaaaagtaatgatagtatgtcaaatgtagaaaaatatgaaaaagcgtatgaacaagaattaaaaactgctttagaagaaatagcaggagtaaaagacgtaacgattaaagtgaatttagattcatctgaagaaaaaattttagaaaaaaatacagtgaaacgctcacaaacaacaggtgaaacagataaaacaggcggtaagagagaagtagaggacgagtctcttgatgaaaagactgtcattatacgtgaaggggataaagaaactcctgttgttttacgaacagagaagccgaaagtacgtggtgttcttgtcgtagcaaagggagtggataatatacaagttaaagcaatggtaaaagaagctgtgataaggctgctagatgtaccggcccatcgcgtttcagtttcaccgaaaaattgatagggaggaaataaagtgttaaaaaaacaaacagtttggttattaacgatgttaagtttagttgttgtactatctgtgtattacgtgacaactcctgacaaaatgaatacagcatcgccagcaacaggtgaaaagattggacaagaaaaacaaggtactgataaagcagtaacaaacgaagcgcctaaagaaactccgaaaaaagaaaatacaagcaaagaaacaacgaataaagaaacagacaaaaaagaaaatgcaaaaaaagaaacaagtaaaaaagagggcaatgtatcagttcaatcaagtgatgagaatttcacagctttacgtatgcaaatggaagatcagcgtagtgaacaaaaagcaaaattacaagaagtgatgagttcaacaaaagcttcagcaacagaaaagaataaagcgaaagaaaattttgatgccattacgacaatggaaacgaagcaagaattacttgagacagtaattaaatctcaaggaggatatccagatgctcttgtaagagctgatggtactgatattagagtaacggttaaagcggcaaaacattcacagaaagaagcaaataaaattattcaacttgtaagaagtgaaggcggatcaaaagatgtaggtgtgaaatttgatccaccagcgaaataagtgaaactttaatccgtagggatttccctacggattattatcttttactaagcaaagggtatgcaaatagtaaaaagagtatgtaagtacgtgtgaatagaaaaaagctatcattttcgatagcttttttctattgcgtctttgtaattatttttactatgttcagctcggaatggagaaacacgttgtgagtaaaagattaatggttcatggtactgatgattactttttccggatttgacgtggatgcaaagaacgcatgcccaaacgattacagcaggtaaaaagagaatgagccatatcatatttccacacctcgacacaatatattttctacactttgaacatactattcttatatgaaggaatgatgaacggtgtgtaaacaaaaaaaaaatatttggtaaaaatatgttattgactataggtgtggtgaagagggaatggcatgtttgctgtgtaacgttttgaaaaagtagtgaatgttttttaagaagtggtcttgccaatttcgtgtgaaacttggtattattactaggtattaaatttttattggaataatatttttacaggagtttcgatttattataaagaaatataaattggaatgtttaaaaaatttatcgtaagatggaaatagtaaatatttctattagttaatgaaatatattttctaatagaatacatcgtatttttacagtcaatctagttttcgtgacgagaatctgtaaaaacgggacaaacaagagtatgggagtggattttacatgtttaaaattcaagaagttcgcgaattaattaaattaattgatagctctaatattgatgaatttgaatacaaaaaagacggtacaacaatcaaaatgaaaaagcgtggtaatgaagttgttgctgtgcaagcacctgcagcaaaacaagctatgcaaccagtagcgcctgttgaagttgaaacgaaagtagcagcagcacaagcagaagcgccaaaacaagaagagaagaaggctgttcaaaatgaaaacctacataaaatcacatcaccgatggtaggtacattctattcttcttcttcttcttcgcctgatacacctccatatgtaagtgttggggatagagtatcgaaagattctatcgtgtgtattgtcgaggctatgaagttatttaacgaaattgatgctgatgtagagggcgaaattgttgaaattcttgttaataacggacagcttgttgagtatggacaaccgctatttcttgtaaaagcgtaataagggagtctttgtgatgataaaaaaagtattaatagccaatcgtggggaaattgctgtacgaattattcgtgcttgtaaagaaatggatattgaaacagttgcaatttattcagaagcagataaagagtcacttcacgtacagattgcagacgaggcgtattgtgtaggaccaacgatttcgaaagaaagctatttaaatttgacgaacattattagcgttgcgaagttaacaggctgcgatgctattcatccgggatacggatttttagcagagaatgcagatttcgcagaattatgccgtgaatgtaacttgatttttatcggtccaagtccagaagctatttcaaagatgggcacaaaagacgttgctcgtgatacaatgaaagaagcaggggttccgattgtaccaggttcacaagggattattaaaaataccgaagaagcgatcgagcttgctaatcaaattggatatccagttattattaaagcgactgcaggtggcggcggaaaaggtattcgtgttgcacgccatgaagaagagcttataaaaggaattcaaattacacagcaagaagctagtaccgcttttgggaaccctggtgtatacttagaaaagtacgttgaagatttccgccatgttgagattcaaataatggcagatacacacggaaatgccattcatttaggagagcgtgattgtacaattcagcgccgtttgcaaaaactactagaagaaagtccatcacctgcacttgatgaagatattcgcaagcagatgggtgaagcggcagttaaagcggcggtagcggttgattatacaggtgctggtacggttgagtttatttatgaatataaaacgaaaaccttttatttcatggagatgaatacgagaattcaggttgagcatccggttactgaaatggtaacgggaatggacttaattaaagagcaaattcttgttgcttcaggagaaaagttatcgttacagcaagaagaagtacaatttaatggttgggcaattgaatgtcgaattaatgcggaaaaccctgccaaaaaatttatgccatctccaggtaaagtagaaatgtacttaccaccaggaggatttggtattcgcgtcgattcagctgtatatccgggatattcaatcccacctttctatgattcgatggttgctaaattaattgttcacggaaaaacacgtgaagaggcaattgcaaaaatgaagcgcgcacttagtgaatttgtcattgaaggcgtacatacaacaatcccgttccatttgcaattgctagatcatcctgattttgtaaaaggtgagtttaatacgaaatttttggaagagcatgaacttgtgacgcagtgatacattaaaggaggtttttttcatggctgaacatatgttagatatgggtcaagatacaactcttggtaaagtagaaattgcaccagaagtaattgaagtaattgcaggtattgcagctgctgaagtagaaggtgtagcggcaatgcgcggtaattttgctacagatgttgttgagaagttaggtaagaaaaatcatggtaaaggtgtaaaggttgaattagcaaacgaagatattatcgttgacctttatgttgtaatgtattttggtgtagcaattccagttgttgcacaaaagattcaagacaatattcgccaagcactctttacaatgacaggacttgagccaaaagaagtgaatgttcacatcgttggcgtaacattcgaaacacaaaaaacagaaatcgaaccagtgtaagaatgaaaaggtgcctagtaacataggcatcttttttatcgtttcatttcttcacaaattacaaccctctaattattatactatttcaaaaaataagaaataaacaaggaaatgtgtcgtttttccaaaaaacgtacattgtgataagatatggaacttgaagttaatctttttattatttttcagccttgtaacccgtgtgtgaaacgataaattgtgttattatcattgtattataaggttggaaaatcaatgaaaactgtaagagtaagtgaattgacggcttataaattataataatataacaaagtataaggaaagacttgaagcataaaggagagttacaatgaaacgtaggacggctagagaaagagcaatgcaagcattataccaaatggatattacaggtgaattagaaccgaaagtagcagtggaaaacacgctggatgaaggcgaagaaacaaatgagtttctagagtcacttgtagtaggttttgtagaaaataaagaagcaatcgatgaagcgattcgtcaaaacttaaaaaagtggaagcttgagcgtattagtattgttgatcgcagtattttacgtgtagctgtgtatgaaatgaagtacatggaagaaattccacacaacgtaacaattaacgaagcaattgaaattgcaaaaacatttggggatgaggaatctcgtcgttttattaacggcgttttatctaatataaaagatacactgtaaattctttaagggggaatcttaaaatggtagcagtaatcatcaaaggaaatgaagttgcggagaaaaaacgagcacaattaacagaagaagttgtgaagttgaaagagcaaggtattgtaccaggattagcagttattttagttggagaagatccagcatctcgttcttatgtgaaaggaaaagaaaaaggctgtgaacaagtagggatttactcagagctaattgaacttcctgaaacaattactgaggaacgtttgcttgctgaaatcgatcgcttaaatggagatgaccgtattaatggcatattagtgcaattacctttaccaaaacatattgaagaaaaagctatcattgaaagaatttcaccagaaaaggatgtagacggatttcacccaatcagcgtgggacgtatgatgacgggacaagatacattccttccatgtacaccgcatggtattgtagaattagtaaaagaaacaaatcttgatatttctggaaaacatgtagtagtaattggaagaagtaatattgtcggtaaaccagtgggacaattgtttttaaatgaaaatgccactgtaacatattgtcattctaagacgcaaaatatgaaagagttatcgaagttagctgatattttaatcgtagctgttggacgacctaaaatgataacagcggattatattaaagaaggagcggttgtaattgacgttggtgttaaccgtttagaaacaggaaaactttgtggtgatgttgactttgacaacgtgttagatgttgcgggttacattacacctgtgccaaagggtgttggtccaatgacaatcacaatgcttcttcataatactgttgaatctgccaaacgtgcaggtgtcgtttgtaaataatttgagtcggctatgaggagagagaaatggagaagcaatatttaaccgttacagcgttaacacgctatataaaaacaaaaatagaatatgatccgcatttgcagtctgtttggttaaaaggtgaaatttccaactttaaaaatcatagccgtggccacatgtattttacattgaaagatgaaaatgcaagaatcgcagcggttatgtttgcgggccataatcgtaatattaaattcaaacctgaaaatgggatgaaggtactcgtgaaagggaaaatctctgtttacgaggcgagtggttcttatcaaatttatattcaagacatgcagcctgacggagtcgggaatttacatttagcgtacgaacagttaaaagttcgtttagaagaagaaggacttttttctcaagtttataaaaaagcgattcctccttacgctaaaacaataggtgtgattacgtcgccaacaggagcagcgattcgtgatattataacaacgattaaacgtcgttatccaattgggaatgttattgtatttccggtacttgtacaaggggagtcagcggctccctcgattgtacaagcgattcgtacagcgaatgaaatgggagagatagatgtactaatcgttggtcgtggtggaggttctattgaggaattatgggctttcaatgaggaaatggttgcaagagcaatctttaagagtgaaattcctattatttcggcagtaggccatgaaacggattttacaatcgcagattttgttgcagatttacgcgcgccaacaccgactgcagcagctgagctggcagcacctaacattatagagttacaagaaaaggtattacaaagaactctgagattgcaaagagcaatgagagagttagtacataaaaaagaagaaaaactacaagtgttgcaaaaatcgtatgcgttccgttatccaagacaagtatatgagcaaaaggaagagcaattagatagagcgctagaacagcttgttttagcgaaagagcgctatattgataaaaaggtgaatcagttaaagcaactttcattttatttagagaagcaccacccatctcaaaaaattatgcaaacgaaggtagctgttgaaacgttgcaaaagcaattacaacgtgaaatgcaaacgttacttcaaacgaaagaatttgcctttgtaagagctgctcaaaaacttgaagcgttaagtccgcttaaagtaatgatgagagggtacgggcttgtatatgatgaagagaagcaagtgttaaaaagtgtgaaagatgtaagccttggagatgctgtttcagttcaattacaagatggaatactagattgtagcgtatcaggcatagaggagcgtgaattgaataatggaaaataaattaagctttgaagaggcaatttcgcaacttgagcatcttgtttctaagctagaacaaggtgacgtacctttagaagaagcgatttcttattttaaagaaggtatggaattatctaagctttgtgatgagaagctgaagaatgtacaagaacaaatggcagttattcttggggaagatggagagcttgaaccgtttactgctttaggagatgaagcatagtgacgattgcttttgatacttttttgaaagaaagtaaaactttcgtagaagaaaaacttgtaagctatgcaaatgaattacaatgtccaaatgtacttcgtgaagcgatggcatattctttggaagcgggtggaaaacgtctccgcccgttacttttgtttgcaacattacaagcgtttgggaaagaaagaaatcttggagtaggtgcagcttgtgctcttgaaatgattcatacatattcattagttcatgatgatttaccttgtatggatgatgatgatttaagaagaggaaagcccacaaatcacaaagtatttggtgaagcgatggcagttttagcaggagatggcttattgacgtatgcttttcaagttattatggcatatgagcaaaaagaaatttctgccgaaaaaaaagtaagacttgtacttgaacttgcaaaagcagcaggaccagaaggaatggttggcggacaagtggcagatatggaagctgaagggaaacgccttacgattgatgaattggagtacatccataaacataagaccggaaaactgcttgaatttgctgtacttgcgggtgcgatactttctgatgcgacagaagagcaagaagaaaagttgcttacgtttgccaaatatatcggtctagctttccaaattcgagatgatattttagatgtcgaaggaactgaagaagagattggaaaaccgattggtagcgatctttctaatgaaaagagcacatatacaacgttgtttactgtagatagagcaaaggatattttagaagaaacaattgcagaagcaaaaggtgcgattagttccttgcaattacaagatgaatatttactatctatttgtgatttgattgcaaaacgtaataactaatataacagcgttttcatttgttgagtcattcatcattttatgatataaatgtaggaaaaggtttttcttttcttgttattggcaaaaatatatgtagattacattgccgttatcacttcgtgttagcggctatttttttcatcgcctaaagaaatatggtttataataggattagggcgcaatagactggttaatagcgggacaagacgaaaaatagaaaagagaatttcttgttttgtgtaaatgttttttataatatttgacatgttgacagattatgaaatgaaagtgagtgatccatgtggatctaacgcaaattcaaaaccctagttttttgaaagatatgtctatcagtgaactagagggattgagtgaggatattcgtaagtttttaattgaagagctctctcaaacaggtggacatattgcacctaatttaggtgtagtagaactcacaattgctctgcacaaattatttgatagcccgcaagataaatttttatgggatgtaggacatcaatcctatgtacataaaattttaactggacgtgcgaaagagtttggtacattaaggcaatatcaaggtctatgtggtttcccgaaacgttgcgagagtgagcacgatgtatgggaaactggtcatagctcgacttcgttatcggctgcaatgggaatggctctggcacgtgatttaaagaaaacgaaagaatatgttataccaattattggagatggtgctttaacaggcggaatggctttagaggcattgaaccatattggacatgaaaaaacagacatgattgttattttgaatgataatgaaatgtcaattgcaccaaacgttggtgcgcttcataatgtgctcggtcgtttacgtaccgcaggaaaatatcactgggtaaaagatgaattagagtatatattaaagaaaatcccagcagttggcgggaaagtggctgcgacagcagagaaaataaaagatagtcttaaatatttactagtatctggtgtctttttcgaagagttaggctttacatatttaggtccagtcgatgggcatgattatgaaaagttattcgaaacgttgcaatatgcaaagaaaacaaaaggcccagtgcttgttcacgttattacgaaaaaaggaaaaggttataaaccggctgagagtgacgttattggaacttggcatggaacaggaccttataaaattgaatcaggtgacttcgttaagccgaaagaagttgcaccagcatggagtgctgtcgttagtgaaacagtacttaagctagcgagagcggatgagcgtatcgtagcaattacacctgcaatgcctgttggatcaaaacttgagaaattccaaaaagaattcccagatcgtatgattgatgtaggtattgcagaacagcatgctacaacaatggcagcaggtatggcaacgcaaggaatgaagccattcttagcgatttattcaacatttttacaaagagcatatgaccaagttgttcatgatatatgccgccaaaatttaaatgttttcatcggaatagatcgctcgggattagtaggagcagatggtgaaacgcatcaaggcgtatttgatatctcattcttacgtcacttgccgaatatggtgcttatgatgccgaaagatgaaaatgaagggcaacatttagtttatacggcgatgcaatatgaagatggaccaatcgcattgcgttatgctcgcggtaatggacttggcgttcatatggataaagaattaaaggcgattccaatcggtacgtgggagacgttaaaagaggggacacaagcagctattttaacgtttggtacgacaataccaatggcaatggaagcagctgagcgtcttgaaaaagctggggtttcagtgaaagtagtgaatgctcgctttattaaaccaatggatgaagcatatttacatgatcttctaggaaagaatataccgattttaacgattgaagaagcttgtttaatcggtggttttggaacaggagtagttgaatttgcatctgaaaatggttaccatagtgcattagttgaacgaatgggtattccagaccgcttcatagagcacggaagtgtaacaaaattattagaagaaattggtttaacgacagatgctgttgtagaccgtattcatacaatgattccatcaaaacaaaaaagggcgtaacaaatgagcgtaaaaaaagaaagagtagatgtactattagtagagcgaggacttatagaaacgcgtgagaaagcaaagcgcgccattatggccggactcgtatatgcaaatgagatgagacttgataagccaggagagaaaatctcgcaagatactgagattacggtgaagggacaagttatgccgtatgtaagtcgtggtggttataaacttgaaaaggcattagagacatttcatcttgatttacaagataaagttatgatagatattggttcatcaactggtggctttacagattgcgcgcttcaaaatggagcgaaattatcttatgcattagatgtaggatacaatcaactagcgtggaaattacgtcaagatgagcgtgttgttgtaatggaacgaacaaacttccgttacgtgacaccggcagacttagaacgtggtttacctcaatttgcaagtattgatgtttcatttatatcattaaagcttatactgccagttttaaaaacaatgcttatgcctaacggagatgtagcagcgttaattaaaccgcagtttgaagctggaagagagcaagttgggaaaaaaggtatcgttcgtgatagaaaagtacatgaagctgttgtagaaatgattgtcgagtttgctttaaaagaaggctatgatgtggaaggtttaacattctcaccaattacgggtggggatggtaatattgaatttttaattcatctgaaatggcatggtgaacgtgagaatggcgaaaatcattctccgatttctatagagcaagttgttacagaagcgcatgacgttctaaaacaaaaagggaaaggggaataacatatgttgttcctctttttgctgtaattgtataatgattgtaaaaacaattgtgtacaagaaacgaattataagttaacataaataagtgaagtataccaatgtttaaactatggtaagagatagtgtgaggtgcaaatgtatgaataaaggtcagcgccatattaaaatcagggaaattattgcaaacaaagaaattgaaacacaagatgaattagttgatattttacgtaatgagggatttaatgtaacgcaagcaacagtatcgcgcgatattaaagaactgcacttagtgaaggtgccattacatgatgggcgctataaatatagcttgccagcagatcaacgatttaacccgttacaaaaattaaaacgaaatctagtggattcatttgtaaaattagacacggcaggacatatgcttgtgctaaaaacattgcctggtaacgctcattcacttggagcacttattgatcatttagagtgggatgagatcatcggaaccatctgtggtgatgatacttgcttaattatttgccgtacacctgacgatacaggtgttgtctctgatcgtttcttaaatatgttgtaacaaaaaatcttgtttgctttccatcgtaaagtggaaagtgaacaagatatttttattggttaaaaatatgaattttcaattgtaatataatattttgtttgcataaagttaaaaaatagatggattgacccgtaaaacaaatgtttggtacaatgaagcgggttagaagagtatatacatacaaatatatagcatgattatttgaatgaagaactgagaaaatcctttagtaagggattattttataacgaggtgaatggggcattgttatcggaattatcgattagaaactttgctattattgaagcattaaatatttcttttcaaaaaggtttaacggttttaagcggtgaaacaggggccggaaaatcgattattattgatgcaattagtttacttgtaggtggccgtgggtcagcagaatttgttcgatatggaacagaaaaggctgagattgaagggctattttatgttgaagatgagaagcatccatgtattgaaaaggcagaagagttagatatagaaatagaagatggtatgattattttaaagcgtgatattgctgcgaacgggaagagtgtatgtcgtgtaaatgggaagcttgttacacttagcatattaaaagaaattgggaaaacacttgttgatattcatggacagcacgaaacgcaagatttaatgaatgaagaacgacatctgtttatgcttgatcactttgatggggatcgaatcgttaaacaattagacatatatcaaaacgtatacgctgactatgaaaaattaaaaaaacaattgaaatcgttaagtgaaaatgagcaacaaatggcacatcgcttagatttaattcaatttcagcacgaggaaattcgcaaggcggatttaaagatggatgaagaaaatgaattaactgaggaacgattgcaaatttctaattttgaaaagatttataaagcgttaggtgatgcatatcgttctttaagtgccgacggacaaggattagataatgtaagaagtgcaatggggcaaatggaaagtattacacatttagatgaagtgtatcaagagaatcatgattcaattgcaaatagctattacttattagaagaggttgcctatcaactgagggaaaagctcgatatgatggaatatgatccaaatcgtttagatgaaattgaaacacgtttgaatgaaattcgtatgctaaagagaaaatatggaaataatgtagaagagattttagcgtatgctgataaaattgaacaggaaatttttacgattgaaaataaagacgttcatattgaaacgacgaagaaacagttgaaggaattagaaagtgttattatgaaagaagcaacgttgttaagtgatatgcgtcatgagcttgcagaacaccttacaaatgcaattcatcaggaattaaaagaattatatatggaaaaaacgaaatttgaagtgagaattatgaagagagaaggaaatgcagaagagccccttgtggaaggtgcgccggtaagacttacggcggatggttacgatcatgtggaattttatatttcaacgaacccaggagagccgctaaaaccactttcaaaggttgcttctggcggagagttatctcgtatcattttagctttaaaaagcattttttctaagcatcaaggggttgcatctgttatttttgatgaagtggatacgggtgtaagtggccgggtcgcacaggctattgcggaaaaaatttatcgagtatcagtaaactcgcaagtactttgtattacgcacttacctcaagtagcttcaatggcggattcacatttatttattcgaaaacaagtagcgaatgatcggacaattacatcagttactgttttaactatggaggataaagtaacagaaatagctcgaatgatttctggtgtggaaatcacagatttaacgacagagcatgcgaaagaattacttacgcaagcgcatcattttaaacagacagcagaggctatccagtaatggatagctttttttctcaaatgacgatttcttaattcttccggttataaataaagcactgcaaggagagattaaaaagtgaagccaagaggctgaatgtggggtaggagcgaggagagtgaacaagttgaaattagaaaaatttcgaaaaataataggtctttgtctccttgtttctttagtttttattggatgttttaaaccgcttcgaacgtttatttcatcaccgaaacaacttgttgtttttgaagggcaacaatcagaaatatcatcattaccagttttcaaagcttcatccacaaatcgtcatgtatttacagtgagttcgaatgaacaaaaacaaggacttatggtaaattctcatcaaaatggtgaagctgatatggtatttcagcttgctggttttccagtgaaaaaagtaaatgtgaaagtgttaaaagattttaaagtgattccaggtggacaatcaattggtgtgaaattaaatacaaaaggtgtacttgttgtaggccatcatttaattcaaactgaaaaaggtaaaatatctcctggtgaaacagcaggtgtacaaattggagatatgattactgaaattaatggtaaaacaattgaaagaatgagtgatgtagcaccgtttattcataatagtggagaaacaggtgaaccgcttactcttgtattgttaagagatggaaaatatattcgtacgaagctaactccacaaaaagacaacggtgaatcgtcttatcgaattggcttgtatatccgtgattcggcagctggaattggaacgatgacatttgttcatccagattctatgaaatatggggcacttggtcatgttatttctgataatgatacgaaaaagccgattcaagtcgaagatggacaaattatgcgctcgacagttacatcaattgaaagaggtagtcatgggaatccaggggagaaattagcaagattctcaccagaccgtgaagtgattggcaatattacaattaatagtccatatggtatttttggaaaattaaatacgaatatgaaaaacggtataatggataaagcaatgcctatcgcattatctcatcaagtaaaagaaggaccggcaaaaatattaacagttattgatcaagataaagtagaagcgtttgatattgaagttgttagtacagtgcagcaaaaattcccagccacaaagggtatggtaataaaagtaacagataaacgtctattagcgaaaacgggcggtatcgtacaaggaatgagcggaagtccaattgtacaaaatggaaaagtaattggtgctgttacacatgtatttgtaaatgatccaacatcaggatatggtgttcatattgaatggatgttacatcaagctggaattaatatttatgatcaagagaaaaaagcgagctaatatatattattagctcgctttttctgttgaaaaattcgttgaaattttgtaaaagctccgcaagaggtgttttttgttgtaaaataaaaggaaagggttgaacgtttcgttgtatttctatgatggaatgtgttgcgaaagggaataaatgagcgataaacatatttttttgtgattttatcggaaagtaagaaactttaaaagggaattttcacacaattgtcgaacaattcatgtagcctagaaggatacacatgtcggagaatcgattcggtaagggaggaaaagctgtggagaaaattaaagtatgtcttgtggatgataataaagaactagtatcaatgttagagagctatgtagccgctcaagatgatatggaagtaatcggtactgcttataatggtcaagagtgtttaaacttattaacagataagcaacctgatgtactcgttttagacattattatgccacacttagatggtttagctgtattggagaaaatgcgacatattgaaaggttaaaacagcctagcgtaattatgttgacagcatttggccaagaagatgtgacgaaaaaagcagttgacttaggtgcctcatatttcatattaaaaccatttgatatggagaatttaacgagtcatattcgtcaagtgagtggtaaagcaaacactatgattaagcgtccactaccatcattccgatcagccacaacagtagatggaaaaccgaaaaacttagatgcgagtattacgagtatcattcatgaaattggtgtacccgctcatattaaaggatatatgtatttacgagaagcaatctccatggtatacaatgatatcgaattattaggatcgattacgaaagtattgtatccagatatcgcaaagaaatataatacaacagcaagccgtgtggagcgcgcaattcgtcacgcaattgaagtagcttggagccgtgggaatattgattctatttcgtccttattcggttatacagtatccatgtcaaaagcaaaacctacgaattctgagtttatcgcaatggttgcggataagctgagacttgaacataaagctagttgagagtaaaagtagtaagggatttaagttttagtaaagcttaataattcttgaaattgatactcgatatcaaatttaaaaccaatgaactttttatttaaagaccaatgaatgttataattcgttggtctttttattttgttgagaaaaagagattatttgatagtatggaaaataaaacctatttttagtaatattacatgtaagtgagttttttataaggcaataaaatagatatagatagggagaaggggaatggaaaataaaatttcaacttggctaggaatagtagcagctatgggagttcttgctattgcagttacatttggaatgttagaacttgcagataatcccgtagataaagaagtgagcgctcaaatagataaaaaagaagaccaaacaatagtaggtagagaggtagatggggtctttgttgatgtgtatgttactgaaaattctactgaaagcgaagtcattacagcgatgcatcgcatgactcatcaaaaagtggtggcagaacgaaaatcgggctctatcccaatgattcaaagtaatgctaaaaaattaaaagaaattataaataagagtagctttgcgaagaaaaatgaacttttagcaattgctgatagatgggcgaaaaaagattttagtaaaattgtagaagatcacaattatttctcggatgctcaagaagatagcgtttgtaaagcaactagagcaatggatgcgttagaagagcaacattatattttaactacattcggggaggaaaaagcgaaagaactatacgaatcaggggatgctccgcacgttcaataaaaaacaatataaagggcttctagtttttttatgatcgtgtttttaggacgcaatggggacttataaataaatggtctgctttctttatgacgtgtaacaaaaaagaaaagatgtgattcattattaaatgatgaaggaacggctaaatcacatcgtagtacatctgttaaaggattttagtaggaaaggcatccgtgatataatagaaaataataaaaagtcctgcaaaacaggactgtattattcttcgtctttattttgtttttctaattcaactagtttttgaattaaaatgtgctgcggcatatgcatgagttgttcaagtggaacacctagtgcttttgataagcggactgcagtatctggagagatttgtaatggtctcatagaagtacctcctttttcgtatagtatagcataagattgggggagtgaggatgactcttatatttgcacatcgtggtgcggctggaacgtacccagaaaatacaatgatttcatttgaagcagctgagtcttttagagcggatggaattgaacttgatgttcaattaacgaaagatggaaaagttgtcgtcattcacgatgaaacggtggaccggacaacaaatggaaaaggtgcggttcgcaattatgtatatgaggacttatgcaagttagatgcaagttataaatttggtgataaagtaggtttttgtaaaataccacttttagaagaggtattagaatggcttgaacaaacgagtttgctacttaatattgaacttaaaaataataaaattccatacagaggtttagaggaagaagttataacgcttgtacggaaatttagtctagaggatcgtgttatattttcttcgtttaatcactacagtatgaaacggtgccatatgatggctcctgatattcaaacagcaattttatatcgcgaaggtttgcatagtccgtgggcatacgcgaaaaaaatgggggctacagcagtacatccgaattatcgttatcttcaagatgctattgccgaactaacgatggaaagtggtgtagaagttcgcccttatacaattaatgaagaaacgcttatgcgtaaatattttgatatgaatatatcggcgattattactgattaccctgaaacggcaagaacgttattgccaataaaaaaatgagaccgcgtgtaacggtctcatttttttatttataaatagtggggcattcctatcttctaaagcgagcttgtactttatttcgtttgcgatctcggtgcaagacgaagccaccaaagatataaaacccgagcgcgaagcagagagcgccgattaaaaattgtaaccacagtatggaaattggtggaaatagaatcccgaatacagtatctctcattaactttataccaaacacagctaatgaaatagggataagtgctaatagtagagcaacgtaacgctgcatacataacgctccttttcagattatttcgtatattttaatgatgttatacggaaagggggtttgtcaagagggtgctgaacgagtaagataagggtgtgaaaaaatttgcagagttacttcgagaggaagtgtaatatatgaaacaaaaagtattaattgttggtgcaggtgaaggcgggagcgcgctgctgaatctgttacaaagttcgaatatatttcaaattatagggattattgatataaatccgttggcaaaaggactacaaattgctaaggaatacgggattgcaattggagaaagtgtaactccatttctttctatgcatatcgatgtaatatttgatatgacaggtgaagatgatgtacataaagttttattagaaaaaaagaaaaaagacactcttcttataccaggtgatatcgcaaaaattgttacaggattagcgcatgagaaggaagggctaattgggcggttagaggaacagacgcaacaaggagaattaattttaaattctacacatgacggcatgattgtaattgatcgagagggacaagttcgtctttttaataaaagtgcagagcgtattatcggatataaaaaagaagaggcgataggaaagtatattttagaagtcattccaactagtaaattacttcgcattatacgtacgaaacaaatagaagtaaattatgaactgacattagagaatggaaagaaaattattacaacgcgtattccaatattaaaagaaggaggagaggtacaaggggcatttgcaatttttaaagatataacagaagttgtagatcttgcggaagaagttacagacttaaaagaaattcaaacactattagaggcaattattaactcatctgaagaagcgatttcggttgtggatgaaaaaggaagaggtttagtcattaacccagcatatacgaaattaacgggtttaacagaagaagatattattgggaagcctgctacaactgatattgtagaaggcgaaagtatgcatatgaaagtacttcgaacgcgtcgtgcggtgcgcggaatacatatgaagattgggcaaaaaaagcgagatgtaattgtaaacgtagcaccagttattgtggatggaatattgaaaggaagcgtcggtgttatccgtgacgtgtcggaaattcaaaaattaacaaatgaattgaatagagcaaggcaaattattcgtacattagaagcaaaatattcatttgatgatattgtcggaaattcagatgaaacaacggcagctatcgaacaggcgaagctaggagcgaatacaccagcaacagtactgttacgcggggaatctgggactggtaaagaattgtttgcacatgcaatccataatggaagtaatcgaaaatacaataagttcgtccgtgtaaactgtgcggccatttcggagacgttgttagaaagtgaattatttggttatgaggaaggggcgttttctggagcgaaaagaggcgggaaacgtgggttctttgaggaagcgaataacggtagtatttttttagatgaaataggggagttgtctgcaaatacacaagcgaaactccttcgtgtattgcaggaaaaagaaattgtaaaagttggtggaacgaaagcgatacctattaatgttcgagtaattgcagcgacacatgtgaatttagaaaaggctattctagaagggaagtttagggaggatttatattatcgattaaataaaattccaattcaaattccatctcttcgtcaacgtaaaggagatataccgacaattgcggacagattgattcaaaaaattaatcaagattacggtcgtaatgtagaagggctcactgattcagccgttttatatttacaatcatacgaatggccaggaaatgtgagggaacttgaaaatattttggggagagctattatctttatgaattataacgagacctatattgatgtacaccatttaccgccattacataacgaagagcaggtggagtcaaagcaatctcatttattacctgaattagaagaaaagccacttgaacatttagtgacagagtttgaagggaatattatttatgaatatttggagagatttgatgggaataaaacacaaactgcaaaagcgttaggaatttccgttcgaaatttatattacaagctagaaaagtatgaccatgcaaaaaatagcatgcaataaattgcgtaccatgcaatttattgcatggtatacaaaaagcgacaaaataagacagaatctttcgttattttctaaagtattgattttactgcattttgaatgcgttttcattattggtaagaccacttttaaaagttggcacggtatttgctttataaatagacgagggacgacggaaagggttgattacaaaatatgaagttagaatacttaattgatcaagcagcaggaaagcctaaaaaaactgtggctgtagcagtagctgaagatcatgaagtaattgaagctgtagcgaaagcaattaaattacagctagctcaatttcgtctatatggaaatcaagaaaaaataatggggatgctacaagaacatggtttacaaacttcagaacatgttgaagtgattgcagcaatgtctagtgctgaagctgcagaactttctgttaaagctgtgagaaatggtgaagcagatgtgcttatgaaggggaacatcccaacagcgaatattttgaaggctgtgttaaacaaagagtggggcctacgtaaaggtagcgtactttcacatgtagcagcatttgaagttcaaaattacgatcgtcttattttcgttacagatgcagcgatgaacatcgcacctgacgtaacacaaaaagctgctattatacaaaatactgtagaagttgcccgggcaataggaatcgacttgccaaaagtggcaccaatcgcagcagtagaagttgtgaatccagcgatgcaggcgacaattgatgcagcgatgttaacacaaatgaatcgccgcggacaaattaaagattgtatcgttgatggaccacttgctttagataatgcagtatcacaaattgcagcagaacataaaggcatagtaagtgatgtagcaggtaaggcagatattttactcgtcccaacgattgaagctggaaatgtgctatataaatcactcgtatactttgcggatgcaaaagtaggagcaatgattgctggcgcaaaagcaccaattgttttaacatctcgtgctgattcagcagaaacaaaagtatattcattagcattggcagttgcgactgcttcaaaataaaccaaaaagggtaaaacattagggggaaacgacaatgacattagaaatcttcgaatacttagaaaaatatgattatgagcaagtagtattttgtcaagataaagaatctggtttaaaagcaattattgcaattcatgatacaacacttggaccggctcttggtggaacaagaatgtggacatatgattctgaagaagcggcgattgaagatgcattgcgtcttgcaaaagggatgacatataaaaacgcagcagctggtttaaacttaggtggtgcgaaaacagtaattatcggtgatcctcgtaaagataagagcgaagcaatgttccgtgcactaggacgttatatccaaggactaaacggacgttacattacagctgaagatgttggtacaacagtagatgatatggatattatccatgaagaaactgactttgtaacaggtatctcaccatcattcggttcttctggtaacccatctccagtaactgcatacggtgtttaccgtggtatgaaagcagctgcaaaagaagctttcggtactgacaatttagaaggaaaagtaattgctgttcaaggcgttggtaacgtagcatatcacctatgcaaacatttacacgctgaaggagcaaaattaatcgttacagatattaataaagaagctgtacaacgtgctgtagaagaattcggtgcatcagcagttgaaccaaatgaaatttatggtgttgaatgcgatatttacgcaccatgtgcattaggcgcaacagttaatgatgaaactattccacaacttaaagcaaaagtaatcgcaggttctgcaaataaccaattaaaagaaaatcgtcacggtgacatcattcatgaaatgggtattgtatacgcaccagattatgtaattaatgcaggtggcgtaattaacgtagcagacgaattatatggatacaatagagaacgtgcactaaaacgtgttgagtctatttatgacacaattgcaaaagtaatcgaaatttcaaaacgcgatggcatagcaacttatgtagcggcagatcgtctagctgaagagcgcattgcaagcttgaaaaattctcgtagcacttacttacgcaacggtcacgatattattagccgtcgctaatcattcatatataacttttacaaaaggcgtggttatctcgtatgaggtttccacttccttttgaatttattagtggaggtagcaacattgtctgtaaatcgaattcttgttattaacccaggtagtacatccacaaaaattggtgtttttgataatgaaagacccgttttagaagaaacgattcgtcatgacgtagaacagattgggaaatacaagcgaattatcgaccaatatgagtttcgaaaagaaacgattttagaagttctacattctcatggtattaacatttcaaagttaaacgctgtttgtggacgtggtggattacttcgtccaatcgaaggcggtacgtatacagtaaacgatgcgatgttagaagatttaaaaaatgggtttagcggtcatcacgcttcaaaccttggaggcattttagcatatgaaattgcttctggattaaacattcctgcatttattgtggatcctgtcgttgtagatgagatggagccagttgctcgtataagtggtattgctggtatggaacgtaaaagtatcttccatgcattaaatcaaaaagcagttgctcgtaaagtagctgaacagttaaaccacaaatatgaggatttaaatttattagttacgcatatgggcggtggtattacagttggtgctcataaaaaaggaagagtaatcgatgtgaataacggtttaaacggagaaggaccatttagtccagagcgtgctggtacagtaccagtagggcaactagtagaaatgtgtttctctggtgagtattaccgagatgaaatgattaaaaagcttgtcggacaaggtggacttgtaagtttaatcggtacaaatgatgcgattaaagtagagaaaatggttgaaaaaggtgatcctgaagcaactcttatttataaagcaatggcatatcaagttgcaaaagagattggtggagctagcgctgtacttcacgggaaaatcgatgcaatcgtattaactggtggactggcatacagtaaaattcttgtcgatgaaataaaagagcgagtggactggattgcagatgttatcgtacatccaggcgaagatgagttagaagcgttagcagaaggagcacttcgtgtattacgtgaagaagaagctccaaaagaatacgttgtacgtgaaaaagaaacggtagctaggggttgagataatggcaaaagaatatgatttagtcatcgttggcggcggtactggtggatatgttgctgcaattcgtgcatcacaactagggttaaaaactgcactagtcgaaaaagaaaatcttggtggtacttgtttacacaaaggatgtattcctagtaaagctcttttacgtagtgcggaagtatatgcaactgctaaaaaaagcgaagagttcggagttattgcaagcaatgtagaactaaactttgcgaaagtacaagagcgtaaagagaagattgtaacgcagcttcataaaggcgttcaacatttaatgaaacaaggtaaaattgatgtgtttgaaggtattggccgtattcttggcccatctattttctctccgatgccagggacaatttcagttgaacttgcaagtggagaagagaatgaaatgttaattccaaaaaatgtacttattgcaacaggttctcgtccaaattcattaccaggtttagaattagacggagagtacgtaatgtcttcagatcatgccctaaaaatggaaacgcttcctagttcaattattatcgttggtggcggtgtaatcgggattgagtgggcatctatgcttgctgacttcggtgtagaagttacagtattagagtatgcaaaaacgatattaccactagaagatcaagatgtttcaaaagaaatgcaacgtctattcaagaaaaaaggtattaaagtggtaactggtgcaaaagtattaccagaaacattggtaaaagataatggagtaacaatccaagctgaacacaacggtgaaaataaagaatttaaagcagaaaaaatgcttgtatctgtaggaagacaagcgaatacgcaaaatattggcttagagaacacagatatcgttgtggaaaaaggatacattcaaacaaatgagttttatcaaacgaaagaatcgcatatttacgcaattggagatgtaatcggtggcctgcaacttgctcacgttgcttctcatgaaggaattgctgcagtagaacatattgcagggaaagaagttacaccaattgattactctatggtatcaaaatgcgtatatagcagtccagaagttgcttctgtcggtttaacagaacaagaagcgaaagaaaaaggctataagttaaaagtaggtaagttctcattccgcgcaatcggaaaagcacttgtatacggagaatcagatggtttcgtaaaacttgtagttgatgaagagacaaatgacattcttggtgttcatatgattggaccgcatgtaacagatatgatttctgaagcgggtcttgcaagagtacttgatgcaacaccttgggaagtagcacatacaattcatccgcatccatcattatctgaggcgattggtgaagcagcacttgctgtagatggaagagcgttacacgcataaaaatgtggatttaggaggttatgaaaaatggcagaagtaaaagaaaagcgccatgaagagcttggcttaagtgatgagcaagtattagaaatgttccgtacgatgttacttgcacgtaaaattgacgaacgtatgtggttattaaaccgcgctggtaaaattccattcgtaatttcttgtcaaggacaagaggctgcacaagttggagcggcgttcgctcttgatagagagaaagattatgcattaccatactaccgtgatatgggtgttgtactagcatttggtatgacagctaaagagcttatgttgtctgctttcgcgaaagctggagatccaaactctggtggtcgtcaaatgcctggtcacttcggtcaaaagaaaaatcgtattgttacaggttcatctccagtaacaacgcaagtaccacatgcagttggtattgcactagctggaaaaatggagaagaaagatttagtaacgttcgttacatttggagaaggttcttcaaaccaaggtgacttccatgaaggggcaaactttgctggtgtacacaaactacctgttatttttatgtgtgaaaataacaaatatgcaatctctattccagttgaaaaacaattagcatgtaaaaacgtatcagatcgtgcgattggttacggtatgcctggatatacaatagacggaaacgatccgcttgcagtatataaagctgtaaaagaagcagcagatcgcggtcgtcgtggtgaaggcccaactttaattgaaacagtatcatatcgtttaacagcacattctagtgacgatgatgatcgtgtttatcgtgataaagaagaagtagaagaagcaaagaaaaaagattcaattataacattcgcggcttatttaaaagaagctggtgtgttaactgaggaatcggaaaaacaaatgttagacgaaattatgcatatcgtaaatgaagcaacagaatatgcagaaaatgctccgtatgcagcacctgaagatgcattgaagcacgtatacgcagaataggggggaacgtttcatggctgtaatgtcttatattgatgctattacattagcaatgcgcgaagaaatggaacgcgatgagaaagtattcgttttaggagaagatgttggtaaaaaaggtggcgtgtttaaagcgacacacggtttgtatgatcaatttggtgaagatcgtgcgcttgatgcaccgcttgcagaatctgcaattgctggggtagcaattggtgcagcaatgtatggtatgcgtccaatcgctgaaatgcagtttgctgatttcatcatgccagcagtaaaccaaattgtttctgaggcagcaaaaattcgttatcgttctaataatgattggacttgtccagttacaatccgtgcaccatttggcgggggtgttcacggtgcattgtatcattcacaatctgtagaagcgatgtttgcaaaccaaccaggtttaaaaatcgttatcccttctacaccatatgatgcaaaaggcttattaaaagcagccattcgtgatgaagatccagtattattctttgaacataaacgtgcatatcgtttaattaaaggtgaagtaccggaggatgactacgtattaccaatcggaaaagcagatgtaaaacgtgaaggtgatgatattacagttatcacgtacggattatgtgttcattttgctcttcaagcggctgaaaagttagcacaagatggcatctctgcacacattcttgatttacgtactgtatatccattagataaagaagcaatcattgaagcagcttctaaaacaggtaaagttcttcttgtaacagaagacaataaagaaggaagcattatgagtgaagtggcagcaattatcgctgaaaactgtctatttgatttagatgcgccaatcgcacgtcttgcaggtccagacgttccagcaatgccatatgcaccaacaatggaaaaattctttatggtaaatccagataaagttgaaaaagcaatgcgtgaacttgcggaattttaatcggggggactatacatggctgtagaaaatattacaatgcctcagctcggggagagcgttacagagggcacaattagtaaatggctcgttaatgttggcgatcacgtaaataagtatgatccgcttgcagaagtaatgactgataaagtaaatgctgaagtaccatcttctttcacgggtgttgtgaaagagttaatcgctggtgaaggtgatacgttagctgtaggtgaagtagtttgtgttattcaagtagaaggcgcagatgaagtagcagcaacagctgttgaggaaaaaacaaaagaagaatcaaaggcagaaatagctacgtctgaaaaagcaccgaaagtaaagcaaccaactgatggaaaaccacgtttttcaccagctgtgttaaagcttgcgggtgagcataacgttgatttagatctagtagaaggtacgggagcaaacggccgtatcactcgtaaagatattttaaagcttgtggaatctggaaatatcccacaagcaggtgcggcgaagaaagaggaagctgtagcggcagtagtagaagctcgcccagaagcaccaaaagcagcaccagtagcgcaaaaagtagaagctgcgaaaccagtttctgtacctacaatgcctggagatattgaaattccagtaacaggtgtgcgtaaagcaatcgcagcaaacatgctacgtagtaaacacgaagcaccacatgcttggatgatgattgaagtagatgtgacaaaccttgtgtcataccgtaactcaattaaaggtgactttaagaagcgtgaaggctttaacttaacgttctttgctttcttcgtaaaagcagtagcacaagcgttaaaagagtatcctcaaattaattcaatgtgggctggcgataaaattgttcagaagaaagatattaacctttctatcgctgttgcaacagaggaagaactatttgtaccagtaattaagcaagcggacgagaaaacaattaaaggtattgctcgtgaaattacagaacttgcaggaaaagtacgtacgaaatcgttaaaagcagacgaaatgcaaggtggaacatttacaattaataacacaggatcattcggttctgttcaatctatgggtattattaattacccgcaagcggctattttacaagttgaatcaattgtaaaacgcccagtaattatggataacggtatgttcggtgctcgtgatatggttaacttatgtttatcacttgatcaccgagtacttgatggtttaatttgtggtaagttcttaggacgtgttaaagaaattttagaaaacatgtcagaaaataatacatctgtatattaataaaaagctcgcttatgcgagctttttattatcttatttcttcatctacatcctactatatgtataaatatctttcccagtaatcttacaataaacgattatgtattaggaatttacgaaaatacattgctgatatatggtatatggatataaaataagaaaagaataatttttttggcaaatcttactgacgaaactgtagtataatatattgtattgtatgaaaaagagagttattctatataagtgttttatagataatgtgtaatcagtcgtcaaaacatgaagaatgttgactcctggttttttatttttgccgtaacaatgtttcaggaggatgtcatgaaaagaagtaccgagtttctaaaaagtttagatgtaaaattaattttaattttgtgtgcactatgtgtgacgagtatagctgctatatatagcagtcagcaaacgggacagtatggagctgcaaactttgctatgaaacaaggtgttaactacataattggggttgtattgttacttcttgttgcaagcatcgacttagatcaattgcaaaaattatcttggccgctttatattgctgggtttgcttcacttattcttttgaaagtattaccaccatcaggttttacacctgaaaaattaggtgcaaaaagatggtttgttttcccagtatttggacaaattcagccgtctgagtttttcaaaattgcattgctacttgtagtagcgagtatagcagtgaaacataatgcacagtatatggcaaggacattccaaacagatttaaagctagtaggtaaaattatgctagtgtcacttccacctatggcggttgtatatagtcaacctgatacaggtatggtgttcttatatgctgctgctattgcatgtattttatttatgtcaggtattcaaaagaaattgatagcattatgtacagttattccgttgaccatattatctgctttaatatttattttctttaagtatcaagattttttctataataatttagttactttactaaagcctcaccaacagtcgcgtattgtaggttggttaaatccatttgaaaatgcagatcaaggttatcaaacacagcaatcgattttagctgtaggtagtggaggaatggaaggtaaagggtttgggggaggaagcgtctatattcccgagaagcatactgactttattttcgctacaattgccgaagaaggtggatttatcgtagcagccttagttgtcttcttgttcctattactactatatcgaacaattattattggttattccgctgataatttatttggtacattattatgcgctggatcaatcggtatattaacagttcaaatattccaaaacatcggtatgatcgttggattaatgcctgtaaaaggtattgcattacctttcttatcgtatgggggaagttccttattctcaaatatgattatgatggggctcatattatcggtacggaaaacttataaaaaatatatgttttcagttaagtaaaaaaagctggttcgtttttaaacgaaccagctttttttacatatatgctcataaacgttgcaaactaaaacaggatagcagtttgagacgggtaaggagtgcaaagtgatgcatatgcatatttttgaaggagcacggcatctttctaatagtgaatgggttattcgggctattatagcatacatatttttaatattagttgcgaaagcgatggggcaaaggtctatcgcacaacttcgttttttagatgttgtattagtgttattgcttggtgggaatatttctaactcattgtctgatgaaaaagtagggttactgggatcgatgattacaacgttcatacttgttgtacttcatattataagctcagttttaatgctgaaatgggatagatggagacgttttttagagccagcacctattattcttatacataatggttccattgattttagcaatttgaaaaaggcgagaattaacgtggaatatttgttttcggaacttcgtatgcgaaatgtgagcgatattcaaacgattaaattagcattatgggaagcgaacggtgtcgtttctatatttcggtatccagaatatgaagcagtttcgcggcttgatcttaaagtggcgggaaaaaaatctccagtttcttttgtattagtaaaggatgggaggatacagaaagatgttcttgcattattaggaaaaacagaagcgtgggcgagagaatttctagaggagagtacagaagtcgaatctattatgttagctacagtagatgaatcacataaaataaatattttgttaaaaaaatgaaaaatatacgcattttgtcgtttcgtacatatgatacaatagtgtggacaacgaaaaaggaggcgatacggtgggatatgtagaagaattacgaaaaatagttggtcatcgccctttaattttagttggtgctgttgtactcgttataaatgaaaatggatatgttttattgcagcagcggacagagccgtacggaaaatgggggctacctggcgggctaatggagcttagtgaatcaccagaagaaacagcttatcgtgaagtatatgaagagacaggaataaaagtgaagaacttgcgactaatcaatgtattttctggagcgaactactttacaaaattagaaaacggtgatgaatttcaatctgtaacaaccgcctattatacggatgaatacgaaggggattttgttatgaataaagaagaagcagttcagcttaaatttttttcagtaacagaactacctgactatattgtaggatcgcataaaaaaatgattgctgaatatatgaagattatggaaaaaaagatataataatagtgaaagaaatacaaaaacacagctctggttggtagtccagacgcatgatttcatgtcagtaaccttcccctccgggatgtcccgtatttctaatcttttaaaggaggggctgtcaatggatttgacagtatatcacgatggccaattttttgttggaatcattacatgtaaagaaaaagggaaattgtatggagcgaggtatatttttgggtcggaactgtcagatgaagaagtgcttatgtttgtgaatggttcacttttagagcattttcagcactttgcaaaatgtggtgtagaagttaaagaaaaacagcgtcctaaaaacataaagcgtatcatacgacaagcagcaaaagaaacaaatgttaaacgttttactaaggcgcaagaggcaattagtttatcttatgaattgcataaacaagaaaagaaagtgcagtctaaagagaagcgagaagctgaaaaagaaagaagacgtttaatgaaagtactaaaagcaaagcaaaaacatcgtggtcattaaagaaaaggtgttagagcaagagctctaacaccttttctatacttaaatacaagtaaacttacttgtatttcataaacattaactggtaagatacaaataggtagttttagaggagggaaaagagtgattaattttaacttttttatgaatgatgttgtccgccaagcgcgtgaagaaattgtctctgctggatatacagaattgacgacgccggaagcggtagaagaagcgtttaaaagaaatggaacaacacttgtaatggtaaactctgtatgtggttgtgcaggtggtattgctcgtcctgctgctgcgcattccgtacattatgataaacgtcctaaccaccttgtaacggtgtttgcaggtcaagataaagaagcgacagcaagagcgcgtgaatatttcgaagggtacccaccttcttctccatcatttgctttattaaaagatggaaaaattgtaacgatggtagagcgtcatgaaattgaaggtcatgaaccgatgcaagttattgcaaaactacaatcgtatttcgaagagaattgtgaagaactataaaaaataagagaaaaggcggcacatccacaatcaagtggatgtgccgccttttttatttattattaaaattcatgagataatagttatgttattttatgcattattttatacataataagcagtgtttgtattgcttttttatttatttttattttatatattgcataaaaataaaagtgctgatacaatacaaacatcgaataaatattctattaaacttttaaatatacattattagggggaagaaagatgaagaagttagtatcaatatcgtttgcacttattttaattgtaagtatattcagcgcttgtagtaatggggaagaaaaggcaactggaaaaagtgaaaaagtactggttatggggacttcagcggattataaaccatatgaatacgtggaagcttcaaaaagtgatgaaattattggttttgatgttgatgttgctaaatatatcggaaaagaacttgggtatgaagtgaaagtgaaagatatggattttggtggtttattagcatctcttagttcaggaaaagttgatttcgtaatggcaggcatgacgccaactgcagagcgtaaaaataatgttaattttacagatatttattttgttgcgaaaaatatggtcatttctaaaaaggattctaacattaaatctgtagaggatttaaaagggaaaaaagtaggagtacaaacagggtctattcaggaagagaaagcagcagaatttaaaaaacaagtagatttccaagttgagggacgtgaccgtataccagaaatcgtacaggaaattaaagctggtcgttttgatgctgcaattatagaagacacagttgctaaaaattatttagagaaaatgaaagatttacaaggaattgaaattaaagaagcaccagaagaagttggagcagcaattgcccttccgaaaaacagtgataaaacagctgaatttaataaagtaattaaaaaaatgcaagaaaatggagaaatggataaattagtgaagaaatggtttggcagcggaaaataagctgcctttcacttttctgtgaggggaatgaaaagaatgaacttagatttttcggcgattacgccttcgataccatatatactaaaaggtttagaagttactttgaaaattgtagcagtatcagctttagcaggatttattttaggaacgctattagcactttgtaaaattgctagaatacgagcattaaatatagcagcagatttttatacatcaatttttcgtggtacaccccttgtattgcaattaatgattatttatttcggcgtcccacaaataattggttatgaaataccagcattcttagctgctgtacttgcatttagcttgaattcaggtgcatacatgtcagaagtaattcgtgctggtattcaagcggttgataaaggacaaacagaagcagcaatggctttagggataccgtacggaaaaatgatgagaaatattattttccctcaagcattaaaaaatatattaccagcgcttgtgaacgaatttgcgacacttacgaaagaatcggctgtagtaacagtaataggcgcgactgatttaatgcgtcgtgcttacattgtaggcggtgagacatttaaatatcttgaaccattactttttgttggactgatttattatatgttagtcattattcttacattagtcgggaaggcaattgaagggagaatgaagaaaagtgattaaaattgaaaaccttcataaatcatttggtaaaaacgaagtattaaaaggaattacaacaacgattgaaaaaggggaagtagttgcaattatagggccttctggatcaggaaaatcaacatttttacgttgtatgaatatgttagaagcaccaacgaatggtcacatttggattggaacggaagaagtaacgaatccgaaaacgaatgttatgcatgttcgtgaaaatgtcggtatggtatttcagcattttcacttatttcctcatatgactgtattagaaaatattacgtatgctcctatcaatgtaaaaggggtaacgaagcaagaagctgaaaagaaagctgagaaacttttaaaaaaggttggattagtagataaaaaagatacgtatccaaatcgtctttcgggaggacaaaagcaacgtgtagcaattgcaagagcgttagcgatggaaccggaagttatgttatttgatgaaccgacatcggcgctagatccagagatggtgaaagaagtgttagaagttatgaaatcgttagttacgacaggaatgacgatggctatcgttacacatgaaatgggttttgcaaaagaagtggcagatcgtgttattttcttggacggaggaaagcttgtagaagatagtgcgccagaagaattttttgcagcgccgaaaagtgaacgtgcgcgacaatttttacaaaaaatattgtaatatgaaaaggttatgtgaataataagtagaaaaggatgacattgtgtcatccttttcttatactagctgtaaatacgtttatacatataggagtaatgatatgtttaaaattggatatcgtacagtaaaaacagcaatagggacaggtgcggcagtttttattgctcagttattagggttagaattttatagttcagcaggtattttagttattttatgtgtacaaaatacgaagcgcaaatcacttcaagtgtcgttacatcgttttctagcgtgtgtattatcaatggcattcgcgttttgtatttttgaaacgattggctatacaccacttgcaattagcatattgttacttacatttattccgactgcagtaatgcttaaaattcaagaaggtattgtcacgagttcagttattgttatgcatctatattcattgaagcaaattacatggcttatagttggaaatgaaattgctatattaacgatagggattagcgtggcgttattagtaaatatgtatatgccgagtagtgaaaataagctaaaagagtaccaggataaaatagagagtaattttaaaacgattttgtttgaaatggttgtgtatttacgaaatcgagaaagtagttggagtggagcagaactcattgaaaccgagaatatgttaaatgaagcaagagatttatcgtttaaaaaacttgagaatgcatttatgcgagaagatgattattactatcgttattttaatatgcgtatgcaacaattcgaaattttagagcgaatgataccactagcagcttctttatcgtggacatatgaacaagctgacatgattgcagatgttgttgaaaacattggtaatgctattagccctgaaagtactggcgttatttccttaaggcagcttcaagaaatgagggaattatttagagacatgccattgccagctacacgcgaagaatttgagatacgtgcgaaacttgttcaacttgtgtatgaaatggaacaatatttactcattaaaagtcgctttaagggaaaggataatataaaagaacttatatagaaggtaggaattatctatgccgtatcttctctctatcatattatgtctttctttatcaccgatttggcctcttggggataatccacgtgccggagatccttttattattgtaaataaagcaacgaataaattagcttacattgacgatggaaagattcaaaaggtttttccagtagcgacagggaaaacgaatgaattaactccagaaggaacttttgatgttgtaatgaaagcaaaggatccgtattacattgcgaaggatattccaggtggatcgccaaaaaatccacttgggtcaaggtggattggatttaatgcaagaggaactgatggaagtaaatatggaatacatgggacaaaccaaccgagttcaattggaaagtatatttcacaagggtgtataagaatgaagaaaaacgatgtggaatatttgtttgatcgcattccaattggaacgaaagtatggattgtgaaatcgaaaaaatcatttcagcaattggcaaaagaaaaaggagccgtcgcatatgaaaaagccaacgaaaagggtggctttttctattataataagttgtcttgacatgtgtacataaccgtgcgttaatgagagtatagaaagataaagttagataaaggggttgctcatatgtacttgaatccaaaactttcgtatatgcagttttttatgggatttctatttgttattacattcatattggcaacttttaatatatgttcttatcttgtagcgattgtatgtatggcattacttaatctcacttttgttattggggcatttcagcagaaacaatatacaagttttgtaatagcgcttgtaatgtcattttcctttagtattgtagcgattgtgttttatataaaataaaccatctcgatgtcgagatggtttattttgttatgtgtaaaaagtaaaaaaaggacgaacacatcgccctttttaccaaaacatactcgcgccagcaagtaatgttgttacaagcatagaaattagcatcacataaaccataactttttgagcttttttatgcatcgttatacctccttgcaaatcagtacaatttcattgtaacgagaaatgaaattatggacaaggggagagtgaggacaaaattcgggaggggattgcaaaatataacaggaaatttgagagtgtgtagagaatatagtaaaagggtatattgttaatttttagttgggcaagctgaagaatggagatacgatgatgaaaatatacgaaacagatcgtttatacttaagggaaattgatgagtcgtatgctgaaacagttcttcaatattacgacagaaatcgtgaatttttaaaagcttgggaagagtatagaccggatgatttttttacgctagattatcaaaagaaaaagttgcaaaaggatagaaaagagttcgaagaagggaaaatcatcagactatggatttttaaaaagggtgatgatacgaaaataattgggtgtatttcatttaatttaatcgttcgtggcatttatcaatcttgtgtactcagttataaattagataaagcagagttaaacaaagggtatacgacagaagcgcttagaaaagcaattcaagttgcttttggggaatttcagttacatcgtatagaagctccgattatgcctcgtaatttagcatctatacaagtagtaacgaagataggttttcaatatgaaggcgtatctaggaagatgttaatggtaaatggcgtgtgggaagatcatatgcgctgggtattgttaaatgagtaatagaaagcagatggttatctagacatgtaaaccatctgttttttgtcttgtatttcgaaacttttgcgaaattctgttataattaatagtgttacatacataatggtagtgcaggaggcgcagtcttatgattaatcaagaacgtttagtaaatgaatttatggaattagtacaagtagattctgaaacgaaatttgaagcagaaatctgcaaagtattaacgaagaaatttacagatttaggtgtagaagtatttgaagatgacacaatggctgtaactggtcatggtgcaggtaacttaatttgtactttaccagcaacaaaagatggtgttgatacaatttactttacttctcatatggatacagtagttcctggtaatggaattaagccttctattaaagatggatatatcgtatcagatggtacaacaattttaggtgcggatgataaagctggattagcatcaatgttcgaagcaatccgtgttttaaaagagaaaaatatccctcatggtaaaattgaatttattattacagtcggagaagaatcaggtcttgttggtgcaaaagcattagaccgtgagcgtattacagcgaaatatggctacgcattagatagcgatggaaaagttggtgaaatcgttgttgcagctccaacacaagcgaaagtgaacgcaattattcgcgggaaaacagctcacgctggtgtagcgccggagaaaggtgtatctgcaattactatcgcagcgaaagcaattgcgaagatgccacttggtcgcattgactctgaaacgactgcaaatattggacgttttgaaggtggtacacaaacgaatatcgtttgcgatcatgtacaaatctttgcagaagctcgttctttaatcaatgagaaaatggaagcacaagttgcgaaaatgaaagaagcatttgaaacaactgcaaaagaaatgggcgggcatgcagacgttgaagtaaacgttatgtacccaggatttaaatttgctgatggtgatcatgttgtagaagttgcaaaacgtgcagctgaaaaaattggtcgtacaccttctcttcaccaaagtggtggcggaagtgatgcaaacgtaattgcaggacatggtatcccaacagttaacttagcagttggttatgaagaaattcatacaacaaacgagaagattcctgttgaagaattagcaaaaacagcagaattagttgttgcaattattgaagaagtagcgaagtaatggaatagaaaaagcgtgtaaatcaattgtgatttacacgctttttattttgattcgattgctttgacaagacgtataagccaatataagaaaacctatggaagtatatacgttgttgctacatgtactagacgaaggaataatcctaacgtattcatattgaaaatcggaagtagtaaataattaattgcaatgattaatataactacaaggaatgtataattgagtttatcccgctatttgccggacagtaagccccccacctcaaaattcagcgaaagtaaagaatttaggtgagggctgattaaagtttcactttattagttgatctcatcataatcagaccctttcacatatatatcctctttatatcgattataaaaagaacaagtaattattataactattgtgcaaaatttgatataatgaaagaacgaacgttctgattagggagtgagtactatgcgagaaatgtatccgaaaaatggtcgtgttattttacatgtagatatgaattgctttttcgcatctgttgaaattgctcatgatccatcattacaaggaaagccattagcggttgctggaaatgaaaaagagagaaaaggaattattataacatgtagttatgaggcgagagaatacggaatacgtacgacgatgcccctttgggaagcgaaaaggttatgcccgcaattagttgtaaggcgtcctaatttcacattatatcgcgaagcttcatttcaaatgtttcaagtcctttcccgttttacagaaaagatacaaccagtctcaatagatgaaggatatttagatattacagattgctacgcactcggttcgcctcttgaaatagcaaagatgattcaacaagcactattaacagagttgcagcttccgtgtagtatcggaatcgctccaaatcttttcctagcaaaaacagcttctgatatgaaaaaacctctcggtattaccgtacttcgaaaacgtgatattccagaaatgatttggccacttccagttgaagcaatgcatgggattggagaaaaaacagctgaaaaattaaatgaaattcatatacatacaattgaacagttagcgaagggagacgagcatatcattcgcgctaaaattgggaagcatggtattgatttacaaaagcgtgcaaaaggtatggatgatagggaagtggatccgagtcaaatgggccaacataaaagtgtcggtaactcgatgactttttcaaaggatatggatgaagagaaagaattgcttgatatgttagaacggttatcaaaatcagtgagtaaaagattacaaaagcgaacccttgtcagctataatattcaaattatgattaaataccatgataggcgaacagtaacacggagtaagcaattgaaaaatgcaatttgggaagaacgcgatatttttcaagcagcatcccgtttatggaagcaacattgggatggtgattccattcgtttactaggtgttacagctactgaaatagagtggaagacagaatcggtgaaacaattagatttgttttcatttgaagaggatgcgaaaaaagaaccactacttgctgtcattgatcaaattaacgataagtatggaacaccgattttacaacgaggtagtcaactactacgtaagcaagagaagtcgtttcaacaaaagttagaaaataagtttatgtagaaggtgtcatgaagtagtaaaatcatgacacctttcctgtttaactcgcttctaaatttaaagaagtcttccatccagctccagtaacgccagactctaatagcattctacttactattttttcaattaagatagccgcatttgtcttgcaatgtaatgtagcctgtatacaaactttttgattagaatctacatcttcactatacaattcttttaaaccgagcccttctgtacttaccatatgcataagtaaaaaacgaatatgtgcttcattttcttctgaacaagtaagggaaagtaagtagttcgtttgttctggtgattcttcttttgattttttattcataaaaagagcaattgggcgaagaagtatatttgctagtaacacgccagctgcacctaatatagctgcaacgaggaaaccggcgcctgtaagagtaccgacagcagctgcacaccataaagtagctgccgtatttagccctctaatactaaaaccatcgcggataataacgccaccccctaaaaagccaatgccactaacgacttgagcagcaatgcgggatgggctagcatcatgatcaagcatgacggataataaaacaaatatacaggcaccaagtgatacgagagcatttgtccgtaacccagccattcggtgtctccattgtctttccattccaatgcaagctcctacaataattgcgataactaatctgaatacaatgtcgtaccataccatcatggtcacctccatatataatatgtgttatgtcttttagaatgagcggggaatacccactcattcttatttttacaaccagctatgaaactttttaatataaagctttttcaggaattgtgttaaaaaagcgtagcctaatagtattcctactaaccaagggaagtagttaagtggcaatgcttgtaaaccaacggctgcaccaagtggtgagaatggaatataaatcccgattgccataataagagcggttaataaaacgactggtgttgatgcagtgctttgaataaatggaatcttttgtgttcttatcatgtgaacaattaaagtttgtgttaacaatccaacgacaaaccaaccggactggaataatgattgctcgctcggtgtatttgcaccaaatacattccacatgactacgtatgtgataatatcaaatatggaactaattgggccgatacaaataatgaagtttcgtaagtttgcagtatcccattttcgtggtttttctagaaactctttatccattttgtcccatggaatagaaagttgtgaaatatcataaagtaagttttgaattaaaagatgaatggcaagcatcggtaaaaaaggaatgaaagcacttgctactaacacactaaacacattaccgaagttagagctagctgtcatcttaatatattttaaaatatttccgaatgtagtacgtccttctaaaatcccggcttctaatatagttaaacttttttcgagtagaataatatcggaagcttctttcgcaatatcagtagcagtatcaacagatattccgacatcagcttcacgtaatgctacggcatcgttaatgccgtctcccatgtaacctacagtgtgtccatttccttgtaatgcgtgtataatacgagatttttgcattggattaagcttcgcaaatacagtcgtttcttcagcaagttttgctaatgctttatctggtaaagaatcaatctcgtaaccgaggattggttcgccgatatctaatccaacttctttacaaacctttcttgtaacaatttcgttatcgccagttaaaattttcacttgtacaccatgtttttgtaatgcttgaattgcagctgctgcagatggtttcggtggatctaaaaagccgatatatccagcgagaatcatatcagtttcgtcttttactgcgtactctttatcatttattcttctatcttttttataagccacagcaataacccgcataccttcactatttagtgtctcacttagttttttgacatttgaacgtatttcctcggtgagtgggacgattttttcatccacttcagtgtagttacaaattgataaaatttcttctacggcacctttacaaaccattgtatgttcacctgaactatcctttacgatgactgacatacgtcggcgggcgaaatcgaatggaatttcatctagcttttgaaaagctaatggattaaatttattgttttcctctgtatgcttaataacagctttatctattaaatttttcaatccagtttgatagaaactatttaaataggcaaattgcaagacgcgattgcattcattccccttgggatctaagtgacgaacaaggaccactttatcttctgttaaagttccggttttatctgtacaaagaatgttcatagcacctaagttttgaatagaatttagctgttttacaattactttttgtttagacatgttaacggcacccttagctaaattagcagttacaatcattggtaacatttcaggtgtaaggccaacagcgacggcaatagcgaagaagaaagcttcttgccaatctccttttgtgaatccattaatgagaaggacaataggtgccataataagcatgaatgtaattaagagccagcttactttgtttacacctttatcaaagcttgtttctacacgctttccgattaccttatttgctaaagagccgaaatacgtatcggtacttgttgagatgacaacagctttcgcgctgccacttacaatatttgttcccatgaaacaaaggttttccatatcgagtggattgtaattttttttcatgtttgtcggtaagatatgcttattttctgtatgatagcagtgttcgtatttttctacagggagtgcttcccctgttaaagaagattgattaacaaataaatctttagcggatacaatacgcacatcagctggaacgatatcaccggctgaaagggaaataatatcgccaggtacaagttcctcaattggaatttctgttgtgtaatttcgatttaaattcgttacattttttgtttcatgtacaaatccatttattctaaatacgctcgcagttgttcgaaccatagcttttaacttatcggcagctttttgagaacgaaattcttgggaaaaccgaattgttgcactaagtaggaccattgcagatacgacaattgttccttgtatgtcatctgtgaaaaaggaaagggctccaagagctaataaaacgaaaataaatggatttttaaatgccagcagaaattgaatgtaccacggcgccattttattatgagctatttcgttcggaccgtataaagaaagtctacgagacgcttcttgtttagataatccatcttgtgttgtttctagaagttttaacgcagagcttacatcatgtgttgcaacctccactaataattcgttatttgtttgcatgctatcttgctcataagcatgctttgtttcttgtctttgtaaattaaacatcagtagttcctcctctgtcatgaaagaggaaacaatctgttacctaactatttgaaatggtgaggaacagtttctttcctacctacatgatgaaatatgaatgtaaaacgtatgggtatctgggccgaatcatcaattgccaactgttcctcacctccgtacaatttagtagtttctgaatatgctatgtttgtttcatagtaaggtgcatatatacgtaaaaagacctttactcaaaacgagtaaaggtctgaattcgcagttaaaagagtctacaacaaagactgttagtaaacataaataaaaacagtttttgtgtatgacaaaatacatgcacctctccctcgttgagttttagcactgtatagcataggtactgaaaccagctacgttaaaaaaggccttcattccgacctttcctgttgacccattggcgtctctcgacatttttgggcagcagcgtttctctatacaggagcctcacctaacagagaccatattcaattacatgttgatgttagcactgtaaaatcgtagtgtcaatatcttttttatctgtgtttttaaaatattaaatggatttataatagatatatgggatgaaatgcatgatattgattataaataatatggaaaataaatatttttataaaaggggaatttgtaatggtaccacaaaattttattataaatattgagaatcaaaaatggttgtttaatgagcaggaagatttatgttctcatggagaaatatatttaaatatggctggaaccattattacgcaggcaggtatggatgaggaatggggaataagtgaatcagctttagctttgttacgaactttagataaagaatatatttgtgatattaaaaatgaagaggggcttattttgcacggatgtggcactatgctaatgttaggatgcccaatttcaattcattggactataaaccatataagtaaaaacgtgattttaaaggactttgtcaaagttatttctactgatcaaaaggctatatactatgaagggcttcatatagaattgaatgaaaatgaatatagaagacaaattgtttcttttgcattacaagcaaaagaattatttaataaatcaagtgacaagataattttagatgagtttgatcaaaggatgtatacaaacttttggacggaatatgacgatttactaaataagtataaataaaaaagcactgtaaccagtgcttttttatttatagattacgagattgtagggttttcaaaaataacaatctctgaactgtttgtagttgaaacacgttgggcgtaatatgttaaagctgaagaaatatatgctggtaacgtatcatttgtatgtgatgttgtatattcatggattaattcctttaaagttgtccattctaattgtgctgggtgatcagacacgaaagaacttacccagcgatcaaatgaagatgaaaaatcagtttgtaaacgaaatacttctttcataataaaacgctccctcgtatagtatgtttaaacttaatttttttactttcatgagagacctgtaaaataactcttggacgtctcaagatagtcagtatggagaatccaattgaaaatgtacatatttattcaagcgttaatgtacatatttaagttagcatttataattagtatcattttttaattaatacaagtaaaagagaccttatagggtattttactgttttcgctcacatggattgtcttatacatctaagttgtttctacataaatatctgtaatctcacctattactatatctttaaaaaatttccaacagaaccaataaaccgttataaaaagtatttaaaataataacaaataggtataataattcccactatagaaaatacaatacttcctaaattaaatgcagaaagtttcgcacgatgaacttgaatttcacctaaatctacccctccactaaaatgcttatccataactttagcgacgttttgttgttgattaacaaaataaggtattagccatatacagcagaataaaataatactaccaaaaaagagtgtgtcaataattgaagctctccaatttaatgaagtaatgactatgagaacaaattctcctaccataacaattaccatagttactacatatctggatttttcagaaacgtttttaaatacagtctcgtccagaattttttctattttagtccatattaaactgattaacacgattaggctaattaagaaaatagtaaataaagctttaactaaaagatactcaaacactaccgacaccacctaataatttctaaattagaatgtaaagttgatttttttaactctattaaaagattaaattcaataatctattaactagcttatcgaaaaatttattgatttaaagatacaacgctatatgtattagttatataggataagctctcccaaaattccttttctaatatatatatcttctaatcgttgttggacttcaattgtctaaatattttatttagcactttatattacttaagggttcgaattttctgaattaaaattccgtgatattgttaagaaaataattattattatgatatctggatgtaattgctgctaatgctttatcttcaagggaaaatataagtttttcgttaccataatactaataacaacctaacaaactgaatatttaccagaaaatactaaaatgtatccctcagcaatttacagtataatacacttttagaaaaaaatcgaatatttaagtatttccttattaataatatgaattaatagaatgtttatattattatacggattaaagatagctcagctgtggtgatctttattcattttttctagagtttatattaacttagcaaactttgtaacagaaccatatataagagcaaatatgataaaagcaatatcacaagttttttatttttatacagtaaccatttgttagccaatcccttctcttgattcggaatattctgttgttttttatcgatttacaattagaggttgaactattatataatttacagaattatgataatttttaggtaaatagaagtagttgaggaggacgtagtgatatgagcacaaatattttaatgtatgaagcagttatgcaacaacttaatgatttttatcaaatgatgttgtcgcagcaaattgaataagcatgaaaaagttagtgattatttcgatgtatgttacgaagcgaaacaaaaactactaagcaaaggggcgttaaaataatgaagaagcttatattagcgacgttaggattagtgatagtattatcatttagtaacaatacaggtgatacacaacatgctctaaaaaaggaagaaattatacaatattcacatgctgatcatttttaatatctcattaacaaagggactccaattatggagtccctttgttaatgagatattgctttagtttatctaattgtaataatgtttgtaaaaagtgtagatattttctaaatttgcagaggtaattatttgttaatcttttaaaacattggcttagtaataccgagggttattatagatatattaatcatataatttgtccatatcaaaatgaacgttttttgcatctaatatattgtaaatatattttattttggaaggatctgattatatggctcataaatctactggagtgtttcgagttccagtttctgaaaatgggattattccaactgctctcaacattatgttaaacaatgattcacgctgccatactagtaatgtaacggtaactgttaagagaagtcgaaacacctttttcccaactcaaaatgaattagttgaaatctctcgtacttttgtttctttagaaccaaacagaacaactaagattgtgttgtttactccagaatttcaagtagaagatttccttgatgtcatcattagtggaaataaagaggatgttaaggatgttcttgtatattctttcttagcagattcagtaggtcacaatctgccatctactgttttcagaaatgcagaatacacttttgcttgctgacactgtgatgatgtattctttcctgtcgtatatctgaattgaaatgttacaagtagcacttcacggcatacaatctatcggtgaaagatcattcggcagaggagcggtagttggtgaaaaaagtttaggatatccagatgcaggtgcacatacgctttgggttatctttacggaaattttaggtagtttgaaatagaaattagaagatcccttctaccttaaggtggaggggttttcttaatattgttttttgatatatattgctaagtatgttcccataattcattctattgtattgagaataatgtcatctacatcaaaaaaacggcttataaaaggaactagtatttgaaggagttccacctcaaacatactccaatgcatataaatatgtttgaggtggatttattaacgaattttatatagcatgaatgaaaatgggataaataaaacaatgtttcttagtatgtttttaagaattaattgagcaggtccttttgaaaataaaaaaagacaccctaaggtgccttcctctgaattaaaacaataatatggttctaagtttaaaaactattgggatttttcctgtgagttttataagtagtttttaagaaattatgagtggttatttttgttttcgaaatattcttctttaattatttgtaattttttttcgttttttgttaattcaaatataaataatgattttctcatgttattagcaacatcttcttcattatattgtttaagctttaataaatttgaaccttttccatagtatagttcacccaataagtaaaaagtatttagattaatagctaattggatacccttatcaatgtattttattgcttcttcgtattgatatgtgtaacttaaattttttgctaaattataaatgattttcaatttaatttctttatctctaggaaaatctaatttgttaaaattatttaaacatcttttaaggatagtaatactttttttgtattctttattttctgcatgaagtatagccattgtatgtagaatatctatttctctctctgataaaaaatcaatattggttacagttagttttagtgcattatttaaaagagttaaagccacttttgttgagttattcacacaatatatagcaattgcttcatgccatattagaaattgtttatcttcttttgtttgaaaattatttgtgtatttttctcttgttactatttcataaagctctttatattgatgttgccttatgcaatccctcattacgtattttacgttttctgtatattttaatttcttgttttgagttagtgcaaatatactatttggatcaacaccgagtctttctgataattgatataacaatatgctagatggataaatcatacctttttcgatcttactaatttgactttgtgaacatattccgtgacataagtcggattgtgatatattttttttaattctaagttctttaatggtaatacccaaatcgttaaattccattttttcacctactatttagcactttattaatataagaacattctctaaccttaatgtaatgtaaagttaatatagttgcaattattgttttaaagggcttatcgtttctataagatggtaagatttttttatgtacaaaaaagacactctaaggtgccttcttgcgatttgctccattgtaatatggtattggatgccagtccaattattattttaccatgttaaatagtttcggttattgagaaaaaagacaactcattatttgaatgcaaaaagtcctagggggactaggactttttactagaatgaatatgatttaaaaaaggacttatataacgtaacatatgaatgtttcgtaaatgtatcaaaaaagtgaacaaaagcgttaatttaaataaaaaaagctccgcgataaaagctgcggagcttcataaggtcgagttatgtcgtactcacaagggattttaacatgaatgttgtggtgaaaatactggtaaatttatcccgtaaaacccccactgattagagtttcacttcattcgaaggaattcatgttttataaattagattatgagagttgatattctccatattgaccagaaaagaactaaaaattctagtgaaattccaagtgttcgtttcctagttttttgaaattcttttattaaatagccaacagcactaattgctataagaatgaaaagaataagttcgagtgtaactggcattttatctactcctaatactgtagtttattatataaagattataagatgtttttgtggctagtggtgaaaaattcaatagaattatttctaaatggagtaaatctttcaacggaccaatcaaaggtcaatacaaaaagtgttatacaatatacgcatggagagtcgtggggctaaagaaatattggagtataaagagttgttagatcaaaggattattaccgaagaagagttcgaagtgtagaaaaaagtaattattaggtatatagatgaaacgctcagatgagcgtttttttatttatatattcgcaagtaaaataacataatatcactatgaatccttataacaatatgaatttttgcatattttaaaatttaatatatcccttaaaaagttttaattgtataatatattttgtcatatttttagatttttcgacataaaccaacaaaaatagagagcgtattgggagaagacattatgtatacaaaactattaaaatcaattacatcattatcacttattggtggtgcgttgttatatacaaatggcagcgatgtaaaagctgctgaagtgggtgttttttctgatgtgccgacatcacattggtcatatcctgcgattaaagatttagcgagtaaaaatattatttccggttatggaaatgggatatttggttttggagatgttgcgacaagggagcaagttgcggctttaatttatcgagtgttagtaccaaataaacaaggcggctcgtttagtaatgatggaactcgttacgtattaaaggatgggtctacgtttaaaaatccttacggtgatattaatcaaagttctacaatgttcccagaagaggtattaactttaacaaatttaggagtttttaaaggtgatgaaaatggccaatttagaccgaaagcttctgtgaatcgtgcagaaatggcacaaattcttacgaatgctttccatcttgcggcaaaacaaaaacatacctttaaggatgttccaaatccattttgggcagaaaatgcaattagtgcggtgcagtcaaatggaatcgcagatggcacagggaacgggaattttgaaccgtatggcacagtaacacgtgaacagtatgcgcagtttttatataaaactttgaagtataaaaatgctgatgtgaaagatacaggagatgcggcattattaacagcgtttaaagaggaagtacaaaagcgtattaatacatacgagacaaatattacactgccatataaaacgaaaaataataatacagacgaagtgatgaatacactttttaacgcatataaagaagtggcaagtaagaatgagtatacaaataataatagatcgaatgtttcatatggactttctggatcacctggaaattatacgtttacgcttaagattacatatcgtgaaacgaaagaacagacggaatatgtcatgaaacaagcgaaagcaatcgtttcttctatcactcaagttggaatggatgatcacgaaaaagtgaaggcgattcatgattacgtagtaaagcatgtttcttatgatacgtcttataaagcttacacagcatatgaagcacttgtaaatcgttctgcggtttgccaaggttacgcactattaacttatcaattattaaaagaagcaggaattgaaaatcatttcgtgacaggaactggggacggacaacctcatgcttggaatttagtgaaaatcgaaaacaattggtatcaccttgatacaacattcgatgatccggtgccagatgagcagggccgcgtaacgtattcgtatttcaatttatcagatgaacaaatcgcaagaaatcatgagtggaaccgtggagactatccgcaagctacaacaaattattatagtacactgacaaataaaattgcggcaggtagtacgaaaacgtctgcatatcagcaaatattaaaagatacaaagttaaactatttaggaaatgaatatattgcaaataactatactgaattaaaaaataaaatgcagcagcgttatagtgcaaagccagaaaagatagaagtactttataagcaatcaatgaacggtgcgctgcaagatgtgaaaaatgcaattggggaaatcggttatccgcaagggttcaaccgtgtttcttataaagcggagccttacaatgcgaaagaagggtattctttagtgacgattacgtttacgtattaagaatgagaaaaagcatctgtttcagatgcttttttttattatattgattcgacaaaatgtgacaggtgaaagcgaattggtctgttatgataatttttgaaattttacattttggaggattaatcatgaataaaaagaagattttcgttgcgttaataggaattgtagccttatttgtaattattaatgtagttgttacgaaagaaaaaacgacatcaaccagtgaaaaaatgtactctgagaaagaatataataaattagtagatgaacattttgaagaaacgcaaaagttgaaaagtgatatgagtgtgttagaaactgaaaaaaaatctcttgaagagcaaatgaaggcgaagaataagcaagggtaaaacaaaaacgctatcttttaaaaaggtagcgtttttgttttgggttataaagttattcctacatttgacatatacagtctgactgtataaaattaaactatacagtttaactatatagtttagctatatagttatcgttacattggaggtctttatgaatagagataaaaatttaccattaacggaaacaacgtattacgttcttttagctttattagagccagctcatggatatttaattatgcaaaaggtggaggaactgagtaatcatcaagtgaaaatcgcagcgggtacattgtatggtgcggtggaaaatttattaaaacaagggttaatagaatcggtaaaaagtgaagataaaagaagaaaagtgtatgtcattacggaacgcgggaaagaagtattgcatttagattttatgagaatgcagcacattattgcggttacaaaaagtttattacacgtatagttaggaggaaacgatgatgtggagattaaaattctttttagactttgagaaagaggaaaaatggttagaagagatggcttggaaaggctatcaactagaaagcaatacatttggttatacatttagatatacagaaccggaagatgcgacgattaaaatagaccatagagtatttagtagaaaaagtgattttattaattactgcacattatttgaagatagtggttgggagcatatagctggtaatcggtggtcaggtacgcaatattttaaaaaggtagatgaagaaagtgaagatgacattttttcagatccaatgtcacgagcagggaagtataagcgtctatctaaaacatttttagaattagcgatctgttatttgccgatattatttttatttatgtatagtaatacaatgaatttaggagcctttgtaaatccgaaagaactatacttgacgccaggattatgggataagcaaggtgtatcatttctatggtcattcttatttgaaacgccatttgcattaatgagaggactttttttgacatttatccccgttgcgacatgtatgtttttcgtttgctcgtataaagcaaatcgattgtatgaagagagaagatgataggagaaatccccttaaagtagatgctttgagggtttttttgaatttgtaaatgactcttcttaaaatagatatgagcttagagaaggacaatgatgtattggaggtcaccatatcaaaaaaagaaaattgtacgtttagacgcattttaaatacaaaataaccgattccttatacgttaagaaaccggttatttattcccccacttttttagagggctttttcttataatggtcttaaatgattgatttaaggttataaacttaaatcataaataaaatatagagtaaaaactatatacgaaataaatgtaacgaaaacaaggaaacatataaactgagaattagatacatattgttctattctttttttcatgttaattcgtattatttttcaaatgtgaagtatcaattggaatttgagctttccaagaaccaattacttttccaattctagttatatttacgtctaaagtaagaggctgtttaaaaacgtctttttcttcagtagttataacaaatgtagcaacaccttcaggtctatcattatcacgaatgcctattttatctaactttttacctgctgccataagttcaaaaggaagataatcatctgaatcatggataaatgatagtctcccgtcatttttaatctcagggttttcctcttgttgcccatcaattttaccatcactctcaagatttaatcctgatgtatcaaattcaaatggtactaaacttccgtccgctttttccattctataatgaactgatatacgtgaatctgcgataaatacttctttgagatgtacagtaataccttgatctgtaattttttcatcaataggaatatatttaccattcttcatcatatcttgtgtgataccattttcatcttttattccttcatttacaactttatcatttgtaattgcattagaaaaataggaagcaacatttgtagccgccacttgtacttgtggaatcattgctgttgtgaaaagtgctgctgcagctactgctgtataaataaaacgttttgattttttactcatgtttgtaaagagtcccttcttttgttgttttttgtgatttatattagaaacattgtctaacttggaacgactttcaaatgttttccatgcttgttctatatcaattttgatttcttgtggtgaatttgcagattcttcatctagcattacgttttcccattgatttaatttactaatttctattaataaatcttggcatgcttcacatgtatctaggtgttttgtgaattcctttcttatatcatgagaaagttctccatcaatatatgtttgaataaacccgatatcataacatttcatctgttatgcctcctccatttgtttataaatcttgcgaaatttcattttggctcggaccaataatgttccaatagaagatatttcaatttgaagtacttctgcaatttctttatattgaaaaccagagaatttcattagtaaaagggttcgttctcgatcattcattttatttagtatcgtttggacctttgtaatttcttcttttcttatccaatcatcgtctaatgatgaaacattttgtacttcatggtattgtatttctttatcaatcttcgcttgctgccttttttcagatcgaaaatggttataggctacataagtagaagatttaatcaaccatccaggtatgttttcaatctctttccaatcactacgatataattgtaaaaatacttcttgtgctaactcttcagcgatagattgatctttaacaatccagatgatttgtttcacagcgtaagcatagtactgcttaaataaatcttcaaaggtcatatcagaagcatgactttcttcattttctatggttaacatgttcgtttaaacctcactttcaatttgatacctgtattatagagaaaccagaaaaacggattttgtgacagtttttctggatattttttattatgtactaaaaaaagcattcgtctaattaaaagagaaatgcaaaaaggaaatgaaaacataaaaactataactcttgcagtagttgtctattaatgcacaagaaaacagttagtttgttgccaaactgtatctaaacgtacaatttcacttcttctattttcatgaatatgtataattacataaaatttcaaagaaaaagagagtatactttcatattgtgtaataaagataaagcccgcctacggaaataggcgggctttttttacttataaagaaaagacaacctttaaggtgtcttccttttgaaatctaggttgtccagtttgttttactttggtgcaatagcaatattgtttggaataaagtttcaccatattgctattaaactaaaatattaagattgcacttaaacgaaatttatagcatcgaagttcattttggagggggaatgtaatactacatttttaaagtattcgttacacttgaacctctgcacattgcgtagagcttttttcatgaagaaaggacactcacgtgagtgtcctttcgatagtttttagcagaagcaagcagctccaacgatgattaataaaataaacaatacaactaataaagcaaatcctccagcgaagccacagccgccacaactaccaccaaagcccataacagttcctcctttaaataggaggagaaaaacaaaggttcactcatgtgttttaacggattccatttactttatgctttttacgaataaatggagcaggtccttttcaaaatagatttattcttagcaggagttcaaaggaaaaacaggagaatccatattattctttaagagcgaatagatagaaatccgcttttatacctttcattaaaataatactagcattatatattataaggaatacttgtccttaattgtaaatgaaaggggggaattgatatgagctatggctatggtcatcctcctggaagatgtcataaacatcacaatgaaactttgtcaacgggtgtattacgtagacattccgctacgttatttcttactgttgaagctatgaatgttgatccagatgatactcgtagagtaacagttgaaatgtttgattggtcatctggttctccggtattgttaccattaatagacccttcaacacaaacattgccacctaatcgatatgttacttttcgttcagcagctcttcctccagcactttttgcttatgaagtaagaatcattcgtccgaaagatagagatgttgttacgaatgtttttggtcttagtgcaatcgtatttaacccacaagaaggaaacaatgttttacaacatgatttagaaaaattagaccttaaatagattttataaaggtctatttattgagcatgattaaaaaaagagtaggatgtaatcctactttttttaacgttaattagaattttaaaagaaatccttcattattttagcatctttaatattcactatcacaccttctaccttatctttcttctcatctttagcaatcgtaatttgctccttattatcagcccacacaagaaattcttcttttgagtcatctttatatgtaacagtaatagtagaatgtgcagattctctctttttttgatctagtgtgatttgtttaggagtgcctttttggactgctgaaacgatagattgtatcattttttcgttgtctgtttgagatttggaagtagtatgatttgttgttttcagtatttcaatgtctgtaatattagcagaatttaattgaaaggtattttgtttatgttcttgcttaacttgtgaagctttatctgtagccgaggtacttgtacaacctattaaagtgaaagataaagcggttagagcgcatatagatatgatttttttcatagtatccctcctcaagcttaattataacaattttctgttaatttaggtggttattgtaaggagaagatgttttaaagtggtaaatgatgatgttcattctctattaaaattaaaattcacataacttttttcatattttatgtttaacatttcgaaaatgggtgtactacatataatataacaaataattcattttaaaggaggaagttaaagatggaaacgaagtatagtaaaccttttgtatatgaatttattacggagaaagaggtcatgaatgcggcgaatgatctcgtgaaaaaaggaatagaccaaaaagatatttacgtattaacgcatgagaaagataggacagatagaattgcggacaatgcagacgtgaatacaattgggataaaagaggagggacttgggacaagcattattaacgtctttcaaaaaacaggagatcagttaagaaataaaatgcaagagttagggcttaatgaggaagaagcgaacttttatgaagaaaaactggatgaagggaaaatcttgttattcgttaaggatttagaaagagtcggtgaatggttacaagaaagaagatgcatgtattctatttaaatttgtatcctttaaatctataaatctattacgaaaaggagattgtaaatatgagtgagaacggactaaaagaacaagttaaaggtaaagttgaaaagaaaaaaggacaagtaaaagaaggaattggtgaagttacagaagatagagagttgaaaaatgaaggtaagtgggaaaaaacgaagggaacgataaaagaaaaagtcggaaaagtgaaacaaaagataagtgatgaattggataataaagaataatatatgttcatcaagctttagttacatactaaagcttgatgaattcaatataaaacgaatataggaggtttaattgtgggacttattattacgtgtattgtaggtggacttattggtgcgttagctggaatgattacaggaaaagactttccgttaggtatagttggtaacgtgattgccggattaatcggatcttgggtaggtagtgcgttatttggtcattggggtcctgaatggggaggcatttttgttcttccagcgttattaggtgcaatcgtctttattttaatcgttacattcttctctagaatgctgcggaaagcgtaagtatgataataaatagtaatcttaagtttattatatatagttataaagttaatgaactgataaaaatacataaaaaagcatccaattaaactaatttggatgcttttttatgtattttacataggaatgagtggaggatgaagaaccccccactcattaacattacactttctattatgtattaagccatcgttacctttttacaattatttattcttacgacttgccttggttctatatgagataagtcctcgctattacttatatcaactacaattgtattcgttagtatgttaataatggaaccaactaattttgtagcatgatcgtgtcgataagaaaattgaacgaaatctccctttttaaagttgtgctcttccatagatagatccccctaaaaataatgtttatacattatacatacacaaaattataagttttaaacatttattagtacgatttaagtgttaagccgagaaaggtgtagaaaatttatttataatgaaaataaaaaaatatgtttaaaactaatttttatgggtaattaaatagtaaaagttcgagataagggggcggaaatgatgaatttggcaataaatattttgcaaaatgatgtaggttatacggtacaacttaatggtgagattgatgcgtatacggcatcagatttaaaaaataaggtaatgcctattacaagcgaaaaagaggttcatattgtagtagattttcataacgtagattatatggatagtacaggcttaggagtttttatagctttattaaaagcagttaagaaaaatgatgggaagctagagtttactggtgtgtctaaaaggctaaaaagattatttgatattacagggctaacagaaatattaaatttgaattccgattttgaaaaagtagaaagaaggtgactagggatgatggagagatttgaaaagatagaaatgaaaattcctgcaaaagcagaatatgtggctattattcgtttaacaatggctggtgttgcgaatcgaatgggctttgcttatgacgatatagaagatatgaaaattgctattagtgaagcttgtacaaacattgtacaacatgcatacaaagaagacgttggagaaattacaattgtcttcgggctatatgaagatcgattagaaattatggctgcggataatggggttagctttgattttaatagcttaaaaaggaaagttggtccgtatgatattagtaaaccagtagaacatttgccggaaaatggtttaggtttatatttaatcaatacgttaatggatgatatacaaattatgcatgatgagggcatgacagttttaatgacaaaatatatacaaagagagcaggtggagaatgatggaaatccaatctcaacctacaaatcttactaaagaagacgttattaaactaattgcagacttccaacaaaaccaatgtgatgaagcacaggaaagattggttaatcactataaaaatcttgtatactccattgcatatcgctattcaaaaggcgggcctatgcatgaggatattatacaagtagggatgttagggctcttaggcgcaataagaaggtatgattattcgatagggaatgcttttgagccgtttgcaatacctacaatagtaggcgaaataaagaaatatttacgtgataaaacttggggtattcacgttccaaggcgaattaaagatttaggcgggaagattaaacttgctatagaggagctaacagatcgtttccagcgttcaccgaagattaaagagattgcagatcatttaggactatccgaagaggaagtgctagaaattatggatgcgaaaaataattatcgcgtatcttccttagatgatgtagttgaaaattcatctgatggcagttcggtagcgaggattgaatctgtaggtgaagtagagcaaggatatgaagaggcagaaaggcgtctcgttttaaaggatattttcaacgtattaaatgacacagaaaagagtgttattcattatatatttggagaaaatttaaatcaaaaagatacaggggaacggttaggtatttcacaaatgcacgtttctcgtattaaaagacaagcgataagtaaattgaagcaagcagcatttttagatacataaaaatttaaaatcattatgtttaaaacatgagaaaaggggtacttattaaatataggaggagatataaaaatgtcacacgatgtgaaagaactaatcgaaggattgaatgaagatttagcaggagaatactcagcaattattatgtataaccataatgcagctacagtttctggtatatatagacaagtgttaaaacctttctttgaatctgaaattagtgatgaacaaggacatgccctatatttagcggagaaaattaagacgttaggtggtacacctactacaatccctttacgagtgaaacaagcagaagatgttagagaaatgttagaatacgctagacaatcagaatatgagacaattaagcgttatgaaacgagaaaagaacaggcagcgaaattaaatatgacagagttagttgtaaagttagaagatatgattgcagatgaaacaaatcatatggaagaattagatcgtcttttaaatgacaaagcaatggtattaaattaatagtggaaatttatagaatgaaagaacaaactctcatttctgggggtttgttcttttgctgtataaaaattatgttagagtaggaaattttcattttgtaactgagtatgcaatactagaaaatgataatagatttacattttaaataagaaaaggggaaataacttgtgtccattttaattgtcgatgataatccggttaacatctttgtaattgaaaaaattttaaagcaagccggatatcaggatcttgtatcgctgaattctgcacaagagcttttcgaatacattcaatttggagaagattcttccaggtataatgaaattgatttaatactgttagatattatgatgcctgaaattgatggacttgaagtttgtaggcgattacaaaaagaggagaagtttaaagatattcctattatttttgttacagctttagaggatgccaataagttggccgaagctcttgatatgggggcaatggattatattacgaaacctataaataaagttgaactattagcacgtatgcgtgtagcgttacgcttgaaatcggaattaaattggcataaagaacaagaagaaaatcttcggaatgaactagatttagctacgcaagtacaaagaaacttattaagtagcccattaagagaagattatataaaaattgaagcaagttacttaccttcatttaaattagctggagatatgtattattggtataaaatcgatgaaaaccgctacggtattatattattagacgtgatgggacatggtatatctgcttcattagtttgtatgtttatttcgtctgtattacgtgaaacgattaaatctttaatcgatccagaacttgtcattaaagatttaaataaatatatgactcttttacataatgagaatgacgatattccatattattttacagcgatatatttagtagtagatacagaaaagagaacgattgaatatgtaaatgcagggcatccttctggatacgttttagtcgatgaaacaaatatgtttgaactaaatcacgggagttgtgcggtaggattttttgatgaaataaaagttaaaaagacagttataccttttgagaagaacgctcaaatcgtattgtttacagatggtgttcttgaagcaattgcaaatgatgaatttgaggctgaagagaaattacgtacttttacagaaagaaaatggggagatttagaaggcgagatagaagggttttacaaggaagaacaaaagaaagcgcaatcagatgatatgtgtctaattatgatacaaacgaatgcgaaataaaaagcgtatgaaatccaaacagaggatttcatacgctttttattgtattttttgataaatttgttcgctaggattaaattgggtataatgcggcattatatttgaaaaacgaagagtttctttatttcctaaacatagaaaaccattgtgacctaagctttcataaaatagttgctgcacttgattttgaagtttacttgtaaagtaaattaaaacgttacgacaaagtataatatgaaactcgttaaaagattgatcggttactaaattatgctgtgcaaaaataatgttttgtaaaagtgatggattaaaataagcaaaacgattatctgttgaataatagttagaaaatgcttgtgtaccgccagcttgtaaataatttttcgtataagtttgcattttatttaacgggaggatagcttgttttgctttttctaacacatttgtattcatatctgttgcgtaaataaccgacttttcacttaatccttcttcgtgaagtaagatggacattgataatacttcttcaccagttgcgcatccagcatgccaaattctaatttcaggttgcttttttaattcaggaataacatgctctctaagcgctttaaaaaaggcagggttacggaacatctcagttacattaatcgagaaatcatttaataactgttctaaaaccccttcctcgtgaattactttttcaattaattttgaaatggtagggatattagagagctgcattctattacaaattcttctataaatagatgtgcgagcatattggcgaaaatcaaatcctgatagtttaaataccgcttccaatagtaattcaatttctaagttcgtgcgctcatccgtatctactgatggatcaaaattataatacttattttccactccaactaaacctcacttattttattaaccatacactcattaccgaatagagttgatgtagatttaatggtttacttatataatctgaagcgccagcagataaacatttttccttatcatttggcattgctttagcagttaatgcgataataggtatttcatttaaccctaagttcattcggatattttccatcgtttcataaccgtccatattaggcatcataatatccattaaaataaggtcaatatttgtattactttttagtatttctaaacactctaagccgttttgggcagtaataatgttggcattttgtttttttaatgcgttttgtaacgcaaatatatttcgatgatcatcatcgacaattaaaatggttttctcttggaagacgttatttgtttcgggagtaacgatagtttcttcaacaacttcagcaggaataacatcttctatcgttgctgcgacttctaaattggataactgtatatctggtaatccatttggaaggttaggaatatataccgtgaaagtactaccttctcctacattactctctaacgtaatccaaccacctaacaatctagcaaactctttacaaatagataaacctaatcctgtaccaccatacttccgaatcgttgcgccatctgcctgttgaaaggcttcgaaaataagttgatgctgttctttagcgataccaataccagtatcttttactgaaattgtaatccaatctttacttatagactgcatatcatgacttaaattacttgtttctatcgaatcgaaatgtaaagaaacggatcctttttctgtaaatttaaatgcattggataataagtttttaataatttgctcaatccgttttgcatctgtataaaacagatcaggaatcgtatcactgtcttcaatagtaaattcgacatttttttgtgcagctatatgtaaaaagttttgatgcatattggctgccatgtcacttatgttcgttgcttcaaaaatgatgtctagtttgcctgcttctactttagataaatcgagtatgtcattaattaaagtaagtaagtctttccctgatgaatgaatgacagttgctaattcaatctcatcgtcggataaattgttattatgattttctcttaacatttcagataatagtaaaatactatttaacggtgtgcgtaattcatgtgacatatttgctaggaactcagatttgtattttgagctgcgtaacaactcgcttgctttttcttctaattctgatttagtaatttgtaagtcagctgttttctgctcagcctcttcagttctagactctaattgttcattcgttgttcgtaattcttctgcttgcatttgtagttcttccgcttgcgtttgcaattcttctgattgaacttgtaactcttctgtcattgcttgtgattcatgtaaaagagtttgaattcgcatacgtcccataatgctatggattgttaaacctagattatcaacggtttgttgaattaaatcttgatgtaaatctgaaatctcagttacacttactaactccattactgcgatcactttatcctcaaataagatagggatgattaatagatttttaggacgtatttctaatactccgctagtgacataacgaaactcttcgggtatatccctgagaataaaacttttcttttctaaggcagactgtccaataaaaccttcacccatttgaatggattgtttcccaatatcagcaccttgatcggcgaaagaagctttcttcacatagtagacagtgtcttcaatttcttcacgtacataaaatgctccgcaagaagtttgcgttttttgtataattccactaagaatttttttacctaacatctcaatagaagatacaccttgatacattaaaattaattctgcaagctcagtttgtaaccattctcttttcgatatttcgtctagtaagtgattcgttgtatgagcaagatcttttatttcatcacgtgtgtttacatgaattctttccgtgattttttctttagaagaaatggatttaatagcttgaattacatttttaatcgtttttgtaatggaattcgaaatatagagtgaaatgataatagaaatacaagaaagtaagaacaataaactgtataaccaaatttctaatttattattttcagtatctaattgtgctgctctttttttcgttaattgctcctcagtgctacggaagttagttacctgtgactgtaatgactgaatttgagtcgtgtcgattgtttgtacattattactattatgatttgcaattaacgggtgaatctctttatttatccaactaataatattttcgttaatctgttttaatttttcttgctgagatgggttatcctctaataatgagaaaagatcttgataatgcttttcgtaatccttttccgcagaattaagagattgtacgtaatttggattattagaaatgataaaccctttcgctttattttcaattgttagtaaatctttctccacttgatttgttaaattgagaactttaaaatcgtgatcaataataaaattacgagatttttgtaaattagaaatctcattgttcaacataatgaaagaaacaagtaagaacaaaatgataactaaataaccagccataattttgtagcgaatactaaattttgctttcgagttcattaaaaattcctaccttcaaggttattaaaacttttctattttaaagaatgaaaaacgtaatatatattatatcagttttcataaggctaaactagaaatccccctattgtattagggggttcttttttaataggggaaatcattttgaaatataaaaacatatatgaaaggtagtaaacgagggaatagaggataacaaatattctaagaagggaagagtgttcttaaagctctttttgcatctattccttcaaaaataaataatacaagatctctcttttttacagtaaggaaaaaggatactagagtgcttaagtttttaatagaagtaagtgctccgtgtttacctataaatacattcgtttgaaatgttgtcattaaagcataaaaatgatgaatctgcgttattgtaggtatttcattataagaaatagtagtagagtgaatggcgttcatcgtaatattcctttccatatagtaagcataacaatataaacatacccgttttaaaaaatgttaaacacataaataagaaaaaatataattatagtttttacgtttagaaaaggttaggaagggtatacatatactacaaagagattgactgaagatgaattgtaagatgtctatgtttagtagattagtctatcaaaatatacttttactttaaataaaaaggagcctggtatacatgaatgaaatgatgattaatattacatttgatttaatttacttgttaagtagttcacttgtagtgcttttactattcgcttttttcataaatggttatgttaataagaaaattagtgtatacagaaatgaagaaaaataaaaatacattatataaaactttaggaggttaatagttatgaatgtagatagaaaaatagtaggtgtttttagaacaattgatgatgcagcactcgttattaatgaattaaatgataaaggatattcagcagataacatttcagctattgcgaaagatcaaaaggaaattgaacatctagaagaaaaatcgggtgaaaaagtgaatagcgaaactgcacataaagcagatatcttttcagcgacagggcttgtagctggaggagtagcaggcgggctcggtggtttattaacaggtcttggtatacttgccgtatctggaatgggtccaattgtagcagcaggaccaatcgcagcagctattggaggagccggtattggcggaggagctggaagtttaataggagcatttatcggcttaggaatccctgaagaccatgctaaaaagtatgaagaatatatttacgatggaaatatattaattttagtagatgcaaaattagatgataagttagaaatctataaaatatttgataagcataatgcctataactctgatttctttaaataaaatgtaaacaaagtgaatatcgtttttgatcttacaactttggcgcggccgaggagtcgtatgactataagagaggaagggcttatagtaaaagatcaagtcctattatgatattgagaagggaagaggtgtctattcgtgattgtaaaaatattaaaggatagtagtaatagtttcctttgcacagttcaaaataaaaatggagatcagtatgtgaaaaaatggtttagtaaacatgaaaataataaagaattagggcgaccaacttttaaagaagtagaaaaggattggaaagaaaatagagactcgtttatgtatccaaatattaaagcgctttattaaaatgaaacataaagcgcattttattattacaaaattgtcacactcctgtaaggtaattcaatagattagttactttttccatgtcataataaagacataagaaagctaattaaaactacaacttattaggagagtgtcagtcatgattgtaacaacaacttctggaattcaaggtaaagaaattattgagtatattgatattgtaaatggtgaagcgattatgggtgcaaacattgtccgagatttattcgcttccgttcgtgatgttgtcggtggtcgtgctggtgcttacgaaagtaaattaaaagacgcacgtgatattgcaatggatgaaatgaaagaacttgcacgacaaaaaggtgcgaacgctatcgttggtattgacgtagattatgaagttgttcgtgatggaatgttaatggttgctgtaagtggtacagctgtacgtatataagtaaataaaaaacaggctcaccccttgaagtttatgctttgagggttttttttgtttttaagttgtagaagtaaactccagttgcaagggtaaaatgaaaaagagacagtgatgctacatatatgtagtgtgagtgcaaactttataataaataataaagttgttatttgagataatggaagaattagtggtataaataactttatagataataatcacaatagagaagacagaatgttcatggatggaatggttaaggggattttccaatctgtaataaaaaacggaggtaccgagaacgttttacagatgtctactacataaaatttataatggattgggggcaatttttatgttttggttaggatgttttttaggatacattgtaggttctgttattacatgtgcgctactttactttggatatagatccaatgaaaataaaaaagcggatatgcaaaaaggggaggagagaaaaatcaataaaagaggtgtatagtaggcgaaaggtaaggtgataacattgatgcaaaaataaaggacagttacatatttcatatgattactatgtactgtcccgcttattccttttggattaggaaaaattgtttcctgtcttgctataaaattcataggcaaaaaaaccaaataaatagcctattccggatcctaaactaattgaaagtagtaaagaatcaggagaaaatatgccgacaataataccgatcaaacaccctaaaagcattgccattggtattaaactgtctaataaaatttgagtgttttttgattttttcttacctaatttgccgtgcttatatttatgttccaatctttttattacaaatactacaattcccccgactagtataataggccaaattgccgaaatgaaccacatgttagaagctccattcgttttttaattaaattataccatatattaacattttaaatttaagcggagaaaaggtcttctgcatttcttctccttttattcatgactaaagttaataggagtaaaattaagcttaaaagtgccattataataaaaacttgcgtataactatcaaaatagtcacgagctatcccagctaggacaggaatgaatccgcccataatatatcctcctgattgcatcatagcagtccatgcacttgcatcttctgaagtttttgtttcatatagcggcagcataagagcgagtggaaatacgccgccgagcccgatacctagtaaaatagaagggatccatggtgtagttagtgggtaaatcataagcgataaacctacgattacaaagcatatactccctaataaccaaagtgctctgtttttataaatatccgctaatgtcggaattaaaaagctacatatcatttggatcacggtaaaaacagttataagagtacctgcttgcttactactcacacccatactttgatttgccggcgcaagccaagtcgtaatggaataaaagattcctgattgtagcccgaaaaggattgtaaataaccatgcttttttatttcttaaaggcaatttattattcttttattttgtgtgttcgtcttcttttttcgtttcataacaggataccaaaacataatagcgataatagttagtgcaccccaaaaagcgagtgccatattccaagatctttttaatacatgttgtaaagggattgttaaacctgcacttaaagaagcgccagttcccatacctactgaatatatgccaatcattaagccaatttttgtagggaatttttctttaataaaacctgatagtaaaggacctgcaagtgcaattccaataccgataaataaagaactcgcgaataatgtggaaatggaaaaggtaaaagctctcatacatgttgccaagccgattaaaataagacaagtcataattgatttttctgccccgtattttttaattaccttcccagtcagtaaggcgaatgtccccatacaaaaaacaggaatagctgttaaaaaactaacggaaaaattgcttatatttaagtcttgtcggattgtttctaataaaggtgaaacagatgtaattccgatacgtaaattaatggaaacaaaaaatagtgctagtatatacaaataagttcgttcttgctgtttcaatttcattttctcctttcttaaacatcagatgttattgagtatatcatctgacgtttttgtgtaatagataaggagcttatttcagctccaaattttgaacagcgtatgttcgcgcctcttcggtattttgctttaaaatagcttggaataacttttcatgaatgccagagttgtcttcatagttcgctgtatgtaatattaattgacttaaaatatggcgaagggcaggtacgaaagattgatacaaatcaaatagaacttcgtttttgctcgcctttgcaatggctagatgaaactgaatgtctgcatctatgtatgctacataatttccttcttgaagggcattttttcttttattcaaatgtccttttaaatataaaagatcctcttcgcttcggcgttgtgccgctaacattgctacttctttatctaacatatttcgtgcttcatacacatgatttatattagctgcttgcagtcttttttcaaatgaatcttgcgttgtatttaatgagacaatacgagtgccttgtccttgtcgaacttctaatacgccagcatgtactaatatctttatactctctcgcagcgttgaacgtcctacccctagctcttccattaattgcggctctgtagggaggcgatcaccaacttcatactcgccagaaaagattttctcttgtagacgttccaatacttcatcgactaattttcgccgagaaacttttgaaaaggatttcttttcgttcatattcatctgctcatctcctgttatattcgtttttatgataaccaatttaagttgtgttgacaatgttattttttaggtagttgaagccgagatactaaaagagattcttttatggcattcaataactcgtcaaaaacactttccctttcgttttctcagcagactgtacaacatcaactgccgctttcacatccgctaattcatacgtagaatggactttcataaaacgtaattgctcattttctactaaacgaattaagtgacgaaacgtttcttgccatttatatggtgacacttcatcattccaatgtcgtaaatgaaatatgtttgcgtgcacttttgcttttgtgacaatctcggcccagttcacttgtattcctgatagaagaccgatcgttaaaaaatgcccgtttggacgtaaggaaaaagctaattcatttccatccggtcctccgatagaatcaatcgcagcatccgcaccaatcccgtttgttaattccataacagtttcataaagcggggcagtggaagtatcaattacatatgcagcaccaaggcgcagtaattcttctgtatgcttattatttcttgtaacggcaattaatcggaaatttaaaatttgggataactgcgcaaatagatgtccaatagcggacccacaagcattcactaataaaacgtcattacgctgtaagtttaacgtttctgtacaagtaacccacgccgtaaggggattaatatacatttgtgccgctgtgaaatcatcaatggaatcaggaatagggactacaaaatcagctgatgtcttcacatattcttgccaagtaccttccccgcgtaaaggtaacactcgtttaccgataagctctcgagaaacaaaagcgccaacattttctacaataccaacaccttcatagccaggtatgttaggtaaaggaattctatgagcgtacgctcctgtgatgggaattaagtcagatggattaatcggtctaactagcatacggacgaaaacttcattatctttcagtggttctatatttttatattcaacttgtaatacgtcttttggattgccaaacttatgaaattgaatgcatgttccaagcaaagtaatttgcccccttagtttgattgggtttattatagcatttttagtttggatggttactttgttagtgataaatagggtttttaatttacgtatttatcagaattttataaaatgtgtatataactataaaatggggggatttcttcatgtgtactagtttgacgttacaaactaaaaatttccaacatctttttgcgagaacaatggatttcacattagatatgaatcaggaagtaataatcattcctcggcgttatcagtggaacaatataactggtgaaactatccgagcgaaaaaggctgttgtcggaatgggaattaatcatgaaggaagggtcattatggcggacggagtaaatgaagctggtatgacgtgtgccactctctatttcccgggattcgctacttatagtaacagtatagataaccataaaacgaatttagcgccatttgattttgtagcttggagcctcacgcaatttaattctgttgaagagttaaaaaaatctgttgataacatttcccttatagatataccattaccagttttaggaattactccgccgctacattggattttagcagataaatggggagagtgtattgtacttgagccgacaactgatggactaaaaatgtatgacaatccattaggagtgatgactaatagtccggagtttaattggcatttacaaaatttaagacaatatattggacttaaatcgcagccatttgcgccaacggagtggggagatgtaccattaagtgcttttggccaaggttcaggaacgatgggacttcctggagattttaccccgccatcaagatttgtgcgggcagcatatggaaaacaaaacattcaaggtatagagaacgaagaagaggggatatctgctatttttcatatcttatcaaattgtgaggttcctaaagggtcagtaataacagaagacggaacattagataataccatctatacgagtgcaatgtgtatggaatctggaacatattattaccatacttacgattgtagacaaattatagctattcatttattccatgaaaatttagatacagctgagattaaaacttatccgtttcagcggaaacaaaaaatattttatgaaaactgaagcgcccctgaaaaagtgaaactaataaaaacacctccatttaatttgcatacttagtatgcgaatttaggaggtgttttttatcatttaccaatattcaggtttacttcttgctattctattaagccgaagccttcttcattctctcaagtaaactagacaacacatgcgtacgataagattctagttttttaccttcataagtacggatacctaattttttaagttcttttacataccaacctttgcttccgaaatacatgtgatcgctccccttcaactttgtttttatttatcctgattgaatatggaggtacaggaattataatgaaggaaatgaatttcgcgcgaaaatggttaactttgttgcaaaagacatatatactaaagatagtatacaacgaggtggacaagacgtgattatagagaagcacgaaattcaaattgaccaaattacgagcggtaaagtgaatatctttactttctatcgaaatagaaagcaaattgatgatcattttttacgattgcaagaaccatcgcttacagcaaactacttcttccattttcattttgatgcagagagcttgcatttactgcaggaagagtttccaggcgtatatccgtacgacggtagtgaaacgattcacgactggacggaaaagatgaaagcagaattgcaacatcagatccaaacaggtaaatgggataaacgcgtacgtatcggtaatcgcattctagatgtggtgtttacgtggtgtgacgaagatatagtagagtgaaaaagaagcggatgacgcttctttttttagcgctggaataaaacgagcttacctgcagtagatgtacagcgatgtgttttttcatacaatcctttttcttgtaagatagattcaccttttgctttcgcttctttttcagttgccgcctcgaatgattcgtctaatgcttttgaaccatctttttcaaagactgttagaacgtatactcccatgaaaattccctccaatatttaaaatcagaatcttataattattttgacataaaacgctacaatatgcaaagaaatatatgacattgcgtggtaaaatagaatgaaactttaatcatcgagaatatttttattctcggtgattattagttttcagcgattttaattttgataagatgaaacttttgaaagatagaaaggatcgttatttgtgaaacaagtaaagtttatacatgcggctgatttgcatttggatagtccgtttaaagggatggagatgaatgttgcccagtctgtttgggagagaatgaagcaaagtacgtttgaatcatttgagcgtattgttgataaagcgattcaagagcgcgttgatttcgtattactagctggggatttgtatgatgcggagacgagaagtttgagggcgcaagtgtttgtgcgtgagcaaatgaagagactttcgcaatacgatatccctgtttttattattcacggtaaccatgatcatttagggggaagctgggcagcaattgagtttccagaaaatgttcatgtatttacggagccttatgtagaagagaaatcattttataaaaatggtgaattgttagcttctatttacgggtttagttatttgcagcaagcggtaacggataatatgacagcgcagtatacgaaaatgagtgatgcgccttttcatattggtatgcttcacggtagtgtggaaggagatgcagagcataatcgctatgcaccgtttcaaattcgtgagttgaaagaaaaacagtttgattattgggctcttggccatatacataaacgtgaaattttatcagaagaaccatacattatttatccagggaacatacaaggtcgtcatcgtaaggaaacaggcgagaagggtgcataccttattgaacttacgaaaaaaggatcgcagtgttcatttttccatacggcagatgttgtatgggacgaaatcgaggttggtattgatggacttgacactgttgatgaacttatgacaagcatatctactgcgatgaatgaatgccgaagagaagaggaaggtacgctattaactgtcgtatttacaggacaaggcccactttcaccttatttgcgcgacgaaaagcgtgtggaagagatttttcacattttagcatctggagaagagcgaaaagatttcgtatatgcaatgaagtggaaaaatgagacggtttcttttgcggaaatcgaacgtttgaaagcggaaaatcatttcgtcggtagtgtgctaaaggagttagaagctttcactaatatggacggagtattgcgcactatttggacatctcctgtagcgcgtaatagtattgaatcttttacagaagaagagaagaaagagattcaaaaggaagcagaaaatattattttagaacaattattccagcaagagagggataaaaaatgagaattgaaaaactccatatttatgggtacggaaaattagaaaatgtggaaatggatctttccttgctgacagtgttatacggtgaaaatgaagcggggaaatcgacaattcgctcatttatgaaaagtattttattcggttttccgacgagaggacagcgccgttatgagccgaaagaaggcgggaagtatggcggtgcgatcactgtgcaaacagagcagtacggtcgtttgaaaattgagcgattgccaaagacggcagctggcgaggtgaccgtttattttgaagacgggaaaacgggcggagaagaaattttaaacgatatattaagcgggatgaatgaaaatttatttgaatctgtcttttcatttgatatgcatggccttcaaaacattcatcagcttggcgaagcagatattggcaattatttattttcggcaagtgcagtcggaagtgatgcgctattgcagttagataaaaagctagaaaaagaaatggaccagcgcttcaagccgagtggtcgtaaaccagaaattaacgtgtcattgcaagagatgaagaaacttgaagagaagatgaaagagtggcaagggaaaattggcacgtatgaaaagcaagtggagcagttaaaagaaagtgaagagaaacttgcttctgttcgcgtggaaaaagagaatgcagaaaagcggaagcaagattatgaaatattagcagcgcttgagcctctcgttattgaaaagcgtgcgcacgagaaagtgttagagaacgagagcgggcagtttcctgtaaacggaatggcgcgttatgaagcaattaaggcgaagatggagccgcttcaattacaagttgattcgctccacaagaaaattgagacagtgcaatcggaaattgcctcgattcaaatagatgaagagtttttacaaaaagaaagttatgtagaagaacttcgtatgcagcatatgtcttacgaaaatgcacgccaagaaatgcgtgatatgacaggaagtattacgaatataaaagaagaaatcgcagaactagaacaacaaattggtgctacttttgaaaaggaaacagttctttcatttgatatgagtttggcaacgaaagagttaattacgcaaacagtgcaaaaggcgcgcgaattagaaacgcaaaaagcacagctcgatgatcgttttaaagtagcgcaagagcaattagaagaacaagaagaaaatataaggcagattaagaaacaaatgttagcggatgaagagagaaatgtgttagttgagaaagagaaatcgttccaagatgcggcgtttatcggtatgggcgcagagagaatgaagcgcaagtatgaagagaaagcaggagcagctaagcaaaagaaaaagcagtggcaaagagtttgtcttcttttacttcttattaacacaggcgttttattcacaagcttatttatagataaccgagcgctcttatttattagtgtcattgtttttgtagggattgttctcgcccttgttttatataaagatccatcaagtggattacaagaagagctccttacacttcagcaaagtgctggcgggagacaaagtgaagaagcgatgtctgttcgctatcagttagaaaaagatgaagagattcggaagttatttgagcgcgagtcttataagttacagcaattggaacgagcgtatgataaagtcgtttcatcgtatgaggaatgggagagagaaacgttccaggcgggagaacaagtcgatgcatataaaacgcgctatatgtttcctgaattttatacgtatgcacacatcttgccggcgtttgagcgtattgaaaaaatgcagcaattatatcgggagttagagaagcaaggtacgcgaaaatcttcattatatgaaatgatttcgcaatttgaacataaactagaaactgttatcggtagtgcggagtatagtaagctacacgaggcacaaagccgtatgcaaaatgagaaagagaagcgccaaacttgtaagcagttaaaagaaaaactggcggaatggcaagaagaatatgagtttatgcaagaacaattaaagcaattactaatagaacgagatggtttatggcatattgcagagtctatagatgaagaggtgtttttagaagcaggtaaattagcggaaaaacgtgaggatgcagagaagcaagtggggcgtttattgccgcaaattgatctgttagaacaacgtttaacgagtttatcattagctgaacattatgaagctgacggttatgaaggaaaattaaagcaagaaattacaactgtccaaaactgtcttacgaaagagaaagaactgacagagcgtattgcgaaacatcgtatggaaattgcgaatttagaagaaggtagtacgtacggcgatttaatgcatgaatgggaaatgaaaaaagcgcaagtgcgtgaacaagtgaagaagtgggctgcttatgcggccgcaaagacagtgttaacgaaaacgaagcactattatcatgaagttcatcttcctcgtattttacaaaaatcagaagagtatttcgtctatttaacaggcggacgctatagtaaaatcttttcaccgtcagaggcagaaccgtttatcgttgaacgtaacgatggtatgcgtttttacagtcatgaactaagccaagcgacagcggagcagttatatttatcgctgagatttgcgctcgcgaaaacattcgaacatgattatccatttattattgatgatagtttcgtgcattttgatgcggtaaggacgaatcgaacgattgaacttataaaggaaattgcaaaggatagacaagtcatattctttacatgtcatgcgcatttacttgcgtattttccagaaaaacagattataaaattaacacatatgcgtaaagaaaatgagttgtagtgtgctatactaaaagtaactgatttggtggaggaattcgaatgaaaaagaaaattgcagagtatgaagttggtgaacaagtcgatattttcttgttaattaaaacagcgacaaaaggtatcgcaagcaatggaaagccatttttaacagtaatcttacaagatccaagtggagacattgaagcgaagctatgggacgtatcaccagaagttgagaaacaatatgtagcggaaacaatcgtgaaagtagctggtgatattttaaactacaaaggacgtattcaattacgtgtgaaacaaattcgtgttgcgaatgaaaatgaagtaacagatatctcagacttcgtagaaaaagcaccagtgaaaaaagaagatatggttgagaaaattacgcaatacatatttgaaatgagaaacccgaacattcagcgtctaacaagacatttattaaataagcatcaaaacgaatttttagactatccagcagcgacaaagaaccatcacgagttcgtatctggactagcttatcacgtcgtatcaatgcttgatttagcgaaagctatctcaaatctatacccatcgttagataaagacttactatatgcaggcgttattttacatgaccttggtaaagtaatcgaactatctggcccaatttctacaacgtatacgttagaaggaaatttactaggccacatttctattatggtgaacgaaattggtaaagcagcagacgaattgcaaatcgatgcagaagaagtattaattcttcaacacatcgtcctttctcaccacggaaaagcggaatggggtagcccaaaaccaccattagtaaaagaagcagaaattctgcattacatcgataacttagatgcaaaaatgaacatgatggaccgcgcattaggacgcacaaaaccaggcgaatacacagagcgtgtctttgcacttgataatcgttcgttctataaaccgacgttccataattaatagtgtgaataaagtggcctcattaagtgttaatacgcttagtggggctgttgtataatgataataaagttattgaattttgattattaaaaagctaagagccttactacattctacgtagcaaggctctttaaagttgtttcaaattacatccatctgttcgttcaagtgtaactattcgcaattatttgatattatataggtgaatagaaagatacattaaaaattagtttcgtagttgtaaaaggaggttatttatattattctcttataattttccaaaagggagagtttatgaaaaagattattgtttttgtattaacgatatttatattattctcaggattcgcaacacaaagttatgcgttgtcagattcgcaatctgcggcaatacaagcgttgctagatgatgcctgtcgtatatcaggtgtgccgggaatgtcaatctcaatacttgctgatgatgaagtgttctacttttcttcagggtatgcagaccgtgaaaagggggtgtctgcaagtgaaaatacactctatgagttagcctcggtcagtaaagcttttaccggtatgggtattatgctattggaagagcaagggctgctctcaatgactgaccctgtccaaaaatatttaccttggtttacattaaagtatcaagggaaacctgttgatatgcaaagtcttacactaaataactttcttcaccataccagtggtctaacaaatattaggcatcttcaaaatattccacaaggcaatacaccggatatgttgcaaaagactgtggaaatgctcgttgatgctgaattggcgttccctcccggtgaacagtataactatggaaccgttaattatgacgtattgggtttggttattgagattgtgtcgcgacaaagctatgaagactttatgaaggaacaggtatttcagccgctaggtcttcaccagacgtatgtttataaagaagatgctcaagctactggacagttggcacagggctaccgttcttccttttttatgacaactccatttaaagctccggattatgctgggaataaacccgcaggctacatcatttctaatacaaaagatatggctcgttggatgggcatacagatgggtatcgtgcaggacatacccgaaatatttcacacggttatcgaaaaatcacatagggtgatatgtctgtttcggctgtcaacggtatgtattatgcggcaggttggtccgtaaatgccgaacaaacgattatagaacacactgggggcaatccaaatttcagaaccgaagtagtcatactgccaaatgaacgaacagccgtctccttgctgagcaacggcacaaataccaatacaaacatggtactaaaagttaaagatatattagaaggcaatctaactcagtcatatgaaataagcggcacacagcttttggatatcattttgtcgtctatcacaattattttttgcctattggccgttttgctatttctcttaggattacgcagaaggagaacgaatgagcgacagccaatgacaaaaaagagaataaccgtaacagttattttcctgatcgctacgattgctctgggtatactgtgctgcgctttcgattggtcaacaatacttatgtggcaaacatatagtgttcttacagctttgatttcgtcagcattattaacagcaagcattacatggtttgtatacactcaccgataaaataccttgctcctaagataagcataatgttaagtcattaaagtccgattggtgagggctgataatcagtggggggtgaagaaaacccccactgattaaagtttcactttattaaaaatgaaataaaatagttaagaagtacgcatgggtgtaacgaagaactaataaaacatatcttgccactagaatgggggcatatcaacttttaaattgagtaccgccagcatttcagaaaaaatatgttaagcaaaaaatacaataagctgtccatatgggcagcttatttacataattctcgatattggaagttgattaatatcagttcatttgtttttcgaaaggagttattttgttcgttcaaagataatatcaaagtaattcgcgtaccccatagttggtggcgcaaatagttgattttatagggggaaaacctctaactaaagcctaacataggtgtttttgtttaaattttgcttaattctcactagtaattaactaaaaatttagaaatcgttatataatgaatttaatttaaaattaggagtgattaaattgccagatatgataaacctcgttcttttcatcattatagcgaggtgttaaaacttctaatagaaagcatattcgattaagaaagaaggggtagttatgaaaactagtgaagaaacgcattggcaaaggtttaaacgtaagagtaaatccccgaaagagtggttaaagaaagtatacgaattttttattaatgaacacgtatgggatgctatctttaaagtgttccttaaactagtatgggcagtaaaaggtatggggaaaagcttgaaacgggtaatagaaaacatattcaattaaattctattctttcataatttcctcatacgatcgataatttccaataaatttgttttatataatggagtgtgaatacgacagttgatacagcaatggctataatacctatatgtgcgtaaaaattgaagtaatcatatttctggaagaaaaattcaaggacaggaaataaaagagtaagactagcaattaatattaattgttcttttttcattatcatgcctccttctttgtataattcagcattgatagaaacaattcctatatgaatatcctatacatgatcagttaacataacgtcctattatcggtagcaaggaaaaaggaggaaccctactctcacaagggaacctcctttttttgttctatcaatctatgcaattttttatacattcctattctggtgcggttttagggttcttgtctgttattggattaacgaaaaaactgtataaaatctcgcatactcttagcgtgtttttttcaaaaatgctggcgatatctcacatccatcaacttatgaattttataatgtcctcaaaccaagaatttctcgtgtttttagtccaaaatgttatttaataaaaaaatatctcgaatttgagataaattacttgctttttaatcacttgagttgtaaagtgatagtaacgaaagcgattgagtcatatgaaaaacatacactcagttgttttcgagttaaaaacgaaagtaacttatgcagtaaaaaccaagatgaatttacaaaaacataatgagaataaattgaacagctaaaaaacatattatttttttatcatcacttgactagtaaaacgaagtggaggaattacaaatgtataaaattaaagggcatcatcacatttcaatggttacgaaaaatgcaaatgaaaataatcacttttataaaaatgtgcttggcttacgtcgtgtgaaaatgacagtaaatcaagatgatccgtcaatgtaccacttattttatggagataaaacaggaagtccaggtacggaattatcattttttgaaattcctttagtaggaagaacatatcgcggtacaaatgcaattactcgaattggattgctcgttccttcagaggatagcttacattactggaaagaacgatttgagaaatttgatgtgaaacatagtgaaataacaacatatgcaaatcgtcctgctttgcaatttgaggatgctgaaggtcttcgcttagtattactcgtttcaaacggagaaaaagtagagcactgggaaacttgggagaaatcagaagttcctacaaagcatcaaattcaaggaatgggttctgtagaaatgacagttcgtagacttgataaaatggcgagtacacttacagagatgttcggttatacagaggttagccgaaatgatcaagaagcaattttccagtccattaaaggagaggcttttggagaaatcgttgtgaaatatttagatggtcctactgaaaaaccgggccgcggtagcattcaccatttagcaattcgcgtgaaaaacgatgcagagcttgcttattgggaagaacaggtgaaacaaagaggcttccattcttcaggaatcatcgaccgtttctactttaaaagcttatatttccgtgaatcaaacggaatcctttttgaaattgcgacagatggaccaggatttacagttgatggagatgtggaacatttaggagaaaaacttgatttaccaccgttcttagaagatcagcgtgcagagattgaagcgaatttagcacctattgaagagaagtaataggagagaaaatataaattaaaaaacattggaggaatataaaatgaaccaattaaaaggaattcaccacgttacagcgattacaagtagtgcagaaaagaactatgagtttttcactcacgttttaggaatgcgtttagttaagaaaacagtaaaccaagatgatattcaaacgtatcatttattctttgcagatgataaaggtagtgcaggaacagatatgacattctttgatttcccaggtgttccgaaaggtgtacacggtacgaatgaaatttcaaaaacttcattccgtgttccgactgatgcagcactagcgtattgggtgaaacgctttgaccgtttggaagtagaacatacaggaattaaagagcaatttggtaagaaaactctttctttcgttgactttgatgaccaacaatatcaattaatttcagatgagcttgataacggtatagaatcaggtacaccatggcaaaacggaccagttccattagaatatgcaattactggtttaggccctgtattcatccgtattgcaaactttagtttcttcaaagaagtgctagaaaaagttttattatttaaagaggttgcgcaagaaggagaattctatttatttgaagtgaataaaggtggaaacggtgcttctgtcattgtagaacataatacagttcttcctgaagcacaacaaggttttggtacagtgcaccatgcggcattccgcgtagaagatcgcgctgtattagaagaatggattgagagaatcagtagcgttggacttccttcatctggctatgtaaaccgtcacttcttcgaatcattatacacaagagttgcaccacaaatcttatttgaatttgcaacagacggcccaggatttatgggagatgagccatacgaaacacttggcgaaaaattatctttacctccattcctagagccaaaacgtgaagaaattgaaaaattagttcgtccaattgatacagtgagaagtacgaaggaatttattaaagagtaaaaatagagatagtaagtaggagagcaagtagttttagcggagtgctggaactacttgcttttttatttatcctagtaagttttctgacaattatttctcaagttattaaaaaggaaaactttggtgtaattaattaaaatattaaattttctgataattatttttcaatgcatagaaaaggagtggtaatatacaattttaataattgtataaaaatcctaattttgtaattttggagaaaaggggatgcgagtgtatgggagcagatgtagtaacgcgggagcaaatgaaacattctttagatgattggtatcgtgtaatgttgcagcaaaatatagagaaggccacggaaatgaaagaggagattgaaagtaagattagtgggttggacgtggatcaggatgtattgctttatcatgcgttgttgaattttagatatggtgcattagttgattggattggggttagagaagatagttttgataaagtagaatcttttgaaatcccggcagaaggtgttctagcttattactatcacttttttaaagggtttcattgcacattaatttcaaattataatgaagcgaaagaacagtatgagcaagctgagaagttattgaaatatattgccgatccgatagaacatgcggagtttcattatcgttatggatatctttataaccaatcatatcaacaaatgttagcgattgatcaaataaaaacagcaaaagagttttttttaaaacaaccaggttatgagattaatcttgcgttgtgcgagaatatgttagggttgtgttatattgatttacaacaattcgagttcgctgaagaaacatttaatacagcattgaatgttttccaacaagttaatcatgaaaaatatatattaatggttagaaataatttaggtttattgtacgcgaatcaaaatttatctgagttagctatccgtcacttatcagaagtaacaaagaaatctcctaatcattttcgagcactatacttggaatcagacgaatacctaaaactaaatgaattagaaaaagcagagtcgttaataaataaagggttacgtatttgtaatcagttaaaaaatcaagagtatcaataccgattcatgattttaaataaaatgaatgcgactactggtgaatttgaaaatgttattttagatgcgatttcttattttgaaaaagaagaattatttgattgtattcaagagtatacggaacgcttagcagataaattttattatgaaaacaatcatgaaaaatctagcgaatattatcatatgagtaaagaagcaagaaaaaaacaaatgataaaaggagcgttaaaataatgagaaaaattgtattaacggtaatagggttcgcatttactttatctctaggatttcatgattttaattcagttgcacttaataaaggagatggtggcggagcaccagcaagaccagactacgttaacattggtgacacaggcggagcaccagcagataataaaggcgacggcggagtaagccaactataataacaaagaaagggacttcaacatgaagtccctttttctattttcaggccatgtagagaaaagaattgacttactttaaatatgtaactataatagttacagaataaccattagtaatagaagtgagttatatttttttagtataattgtaactgttttagttacaattaaaaagagaacataaaataaccaaaaaatgtaaaaactttaaatagcaactcaagaaaggagacgggaactttgaaacggtttaagttttatttgattagcggtattgtgcttgttttgcttatcgtatgtaacttcgttgataagccgattgcgaaggttgaagaagtgaaagatactgttatgatgaagctgaatacgaaagagagtatggcgcaaattgatgggcagacgatttattttaagcaaattggtgaggggaaacctccgttactcatgttgcatgggtttggtggttcttctgatgggtttagtgatatttatccggaacttgtacgagatcacacgattatagcggttgatattttagggtttggacgttcttctaagccagttgattttcagtattcgtttcctgcgcaagttaatttatattataagttaatgaagaagctcgggtatgatcaattcgcagtacttggtcattcgatgggcggagagatgtctctcaatttagcgtatttatatccggatgcagtgacgcatctcatcttggcggatgctaaagggatagagtctttccagcaaaaagaaagttatgaagtaccaccgctatcgacggacttacaaactgtaactgagattacgaagtataataaaaatgaagtaaaaaatagtcgtgatgataaagagcattatgatcagcttacgaaaatgcgagagcgccgcattttcgtaagctgataaaattaaggcaccgactttaattatatggggacgacatgataagagtgtttcgtggaaaaatggtgaactgtatcatgggctatttgcaaatagtacgtttcatattattgaaaaaggataccacgcaccgtttcgtcaggaaccaattgagtttatggaatatgtacaagcatttttcgcgaagcatccacaataaaaattttaagcataaatccacttctttcctcatagagtgaaactaataaggcttgtctaaggaaaggaatgaagtagagtggaaactttaccatggtgggtttatcttgtaattgttgggattgtattaagtggctacatggttttatatacttcgaaaaaagagcaagatatggataatgagtttatcgaaaaagaaggcgaagtatatatgaagcgtttagaagaagagcgtgagaaacgtaatcaggatagtgataaagattcggtattgctttaatagaaattttgaaaggttaccacttagtagaaattattgcctaggtggtagcttttttcttttgagggagcggtatatggttcatccacaatctagatagtagaagataaggaaagatactattttttccttaagctgagaagttaacaatttattgttagcttcttttctttgtgattaaaattttcttttcgtttagtaaatttccttttaaaaactacataaatccctttgaccaaatatgtaattctttgtaaaatcttatatatggaaagattatgaatatacaggaaatctatggatagtagattttaataaattattcggggggaatttattagttaagtatattaacttgtttgcactacattttacaaataaaggggtattagtaatcatgaaagcaaagaaattagtaagtttagcgttaccagttatgttattgagtggttgtattacaattgaaactgatggtaagaaagctgaaccaaagaaagaagaaacgcaaaaggtagagaaagagaataagacttctgaaaaagagagtaagtcaactgatggcaagaaagaggatagcttatctgtagcgaaaggtgaaggtacaaacagtagttcatcaagtagtcaaccaagttcttcttcaaataattcaacttcttctagttcttcaactggtaaggtaactggttcagatgttgaaaggtacaaggcagatatcataaatagtgctactcaaattgaaaatacaatgaaattaattgaaggaatagcagattcagacgtaaaatcatacaaacaaaagaaaagtgaagtacaactgagtttaggtggagcaaaggcaactgctacaaagctgaagaatctacaagcgcctccagagttacagggagaacaggcgaagataaagcagtcgatggaactatatgcggattgttttcaacttctctttgatgcattagatcaggaagacgaaagtaaaatgcatcaatcagtaagtaaagcacaagaaggttcgaaactgtttgaagaggcagcgaagagtatcggtagtaaaaccaactaaaaataaagtatttaaaggggtatttgtaagtgcagttggtgtaagtgaagagttaggaattagttatggaaacacattacaaatttatcaaatggacgataatgttcgtattcgatatgtaaaacaataaataattggtgaaaaactctgtaataaattttacagggttttttgttagttctagtttatttttttgtcttcctaagcgctaagcatactagtataagttgagaaatgaacaaaacgataatgataggcagatgatgtaactccatagtaactgtaaccatccaaagcccaattcatacactatgatggaggctttttacttactaattggatgaaaaaggagtgtaatcatgaagaaacgtactgttaatgaagcgggagggaatgtgccacaaccaatccgcagcgacggagcaggtacgattgattctggacctcgtaatgttatgcgggatattcaaaatccgaatatgcttgttccgcctataacggatgcaggattagttcctaacttgaagttttcattctcggacacttctatgattttgaaacaaggcgggtggtctcgggagattactgttcgagaactaccggtttcgacgacgattgcgggagtaaatatgagtttaacggccggtggagtacgagaactacattggcataaagaagcggaatgggcgtatatgcttttaggacgggcacgcataacggctgttgatcaaaatggacggaattttattgctgatgttggaccaggtgatctttggtattttccgcctggtattccacattccattcaaggattggaacattgtgaatttctactcgttttcgatgatgggcatttttctgatttatctactttagctatttctgattggtttgcgcatacgccaaaagaagtgttgtcggctaatttcggagtacctgagagtgcttttcgttctatcccttcagatcaagtttatatttatcaaggagaggtgccaggttcgcttgaaagtcaggaaattcaatcaccgaaaggagaagttcctttaacatttaaacatgaattgttaaaacaaaatccgattaagacgcctggtggtagcgttcgaattgtagattctacaaatttccctatttccaaaacaatcgcagcagcgctcgttgaggttgagcctggcggaatgagagaacttcattggcacccgaataatgatgaatggcaatattatttgacaggggaagcgagaatgactgtgtttcttggaaatggtaccgctcgtacatttgattatagagctggcgatgtcggatatgtaccgtttgcgacggggcattatattcaaaatacaggtaccgaaacattatggtttttagagatgttcagaagtaatcgttttgaagatgtatcgttaaatcaatggatggcactgactcctaaagaaatagtggagagtaatatacatgttggcccgcaagtaatggattccctgcgtaaggagaagaggcctgttgtgaaatatccggggttttcatatagtccgaaaaatgatgagtaaaaatgaaaatttgcgttattctttctggagactgataagaagggatggcgtattttttatgcctaatctagtctttatcccgctatttgccgggcagtaagaccccacctcaaaattcagcggaagcaaagaagttaggtgggggggcgggctgtccgtaaaagcccgattggtgagggttgattaaagtttcactttattagtatccgttccttgtattattgttcgggaaattattattggagcatagtatagggaagatacatataaaagagcgccattataagctgtaacgcataagttgcgcaggaaatgcaacgataactagctttactcttcatcatttatttgaacataatgggcatagagaggtgataaacacagtatgatttttagtgagcgtttaaaagaagaaagggaaaaaagaaattggtcgcaaaatgatttggctgaaaaaattcatgtgagcaggcaatctgtttcgaaatgggagacgggaaagaactatctgagcattgaaattattattcatttaagtgatctgttcggtattacaattgatgaactgctaaggggtgatgaagaattgacgcagaaagtaattgaagatagtaagcaattggcgtatccaaaatggaaggtgttttttgatagtctatttatgataggagtatttttgtttattgcaaaaatcgttgtatggatgctaaataagtttgctggagcaagtattacaattgtagcagatgcaccatatgtaatgaatcttttaccccttgcattcatgattataggtggtatgggatcggataagttgaagaaaatatatagatagaggaaagatttgaaagaaatcccctacactggctgttcttttcacttaaattgtgtactataaaggataggatgacataaagaaggggatatagagaatggaatttcatgaacagaagattttgccggcagtgaggcaaattaaagatttggaaaagctattacatagttcgtatgaatatattgttattttagatattcatgtcggccaattgaagagtgttatatcgcttgcgaagcaatattgtaaaaaggtgtttttacatgtggatttaattcatggtttgcagagtgatgggcatgcgacggaatatttatgtcaggagtttagaccgtacgggttactttcaacaaaggcgagcgttattatgaaggcgaagcaaaaaggtgttgtggcaatacaacgcatctttttaatcgattcgagtgcgatggagaagagctgcaatcttttagataagacgaaaccggattatattgaggtacttcctggagcattaacggacgttatcgctgaagtgaaagagcgtactggtgtaccgattttagcaggtggttttattcgtactgtagaagatgtggaaagagctttaaacgctggtgcgacagcaattacgacatcaaaacgcgaactatggaaacattaccaaaaaaagtgacgaaaatgtgaattttttcgttgacaccgctttcatttacggttaacattatagacaagttaataaacgtgacggagaaaagtagagatccacatttcattgtttctatataaatttatatagaagcgtgcaagctgtgggtctttttcttttgacaaaaacgaatggccattcattttacctctatcacatttggaagcgtttaaattgattgtggagggatactatgtcagcatttttaggagagttaatagggactgcgttgttaatcgtacttggtggcggcgtttgtgctggtgtaagtttaaagaagtcgtttgcgaaagattctggttggattgtaattacaatgggctggggcttagcggtagcggttgcagcatatgcggttggatcaattagtggggcacatttgaatccagctttaacaataggattagcatttaagggagcgttcccatggagtgacgtacctggttatatcgcagcacaaatgattggggcaattatcggggcagttatcgtatatttacattacttaccacactggaaagaaacagaagatccaggaacaaagttaggtgtatttgcaacaggtccagcaattccgaacacatttgcaaaccttttaagtgaaatgattggaacattcgttttagtatttggtatattagcaattggtgcaaataaatttgcagatggattaaatccatttatcgtaggtttcttaattgtaagtattggtttatcattaggcgggacaacaggatacgcaattaacccagcgcgtgatttgggtccgcgtatcgcacacttcttccttccgattgcaggaaaaggcggttcaaactggaagtatgcatggattccagtagttggtccaattttaggtggatcacttgcaggtttattccatcaagttgtatttgaaggaaaacaaaattcagcacttatttatgtgattatcgcaactgtgattgtactagcaatctcttatatgacaagtaaaaaaagcggaagcaatacaaatagtagaaaagtagcataagggggaaaccgatatgaaaaaatatattctttcattagaccaaggaacaacaagctcacgcgcaattttattcaataaaaaaggtgaaattgttcattcagctcaaaaagagtttacacaacattttccaaagccgggctgggtagagcataatgcgcaagaaatttggggatctattttagcagttatcgcaacttgcttaagcgaagcagatgtaaaaccagaacaaatcgctggtatcggtattacgaaccaacgtgaaacaacggttgtctgggataaaacaactagtaaaccaatttacaacgcaattgtatggcaatctcgccaaacagctgaaatttgtgatgagttaaaagaaaaaggttatagcgaaatggttcgcgaaaaaacaggtcttttaattgatgcatacttctctggtacgaaagtaaaatggattttagataacgttgaaggtgcaagagagaaagcagaaaacggcgatctattattcggaacaattgattcgtggcttgtatggaaactatctggtggtaaagcacacgtaacagattattcaaacgcatcacgtacgttaatgtttaatattcacgacttacagtgggatgatgagcttctagaaatgttaacagtaccaaagagcatgcttccagaagtacgtccatcatctgaaatttacggagaaacaattgattaccacttcttcggtcaaaatgtaccgattgcaggtgtagctggtgaccaacaagcagcattatttggacaagcttgtttcggtgaaggtatggcgaaaaatacttacggaactggttgcttcatgttaatgaacacaggtgaaaaagcagtagcttctgagcacggtctattaacaacaattgcatggggaatagatggtaaagtaaactacgcattagaaggaagtattttcgtagcgggttctgcaattcagtggttacgtgacggaatgcgcatgtttaaagatgcaagtgagagtgaagtgtatgcgagtcgcgttgaatcaactgatggtgtatacgttgtaccagcattcgttggactaggaacaccttattgggatagtgaagtacgcggcgctatgtttggtgtaacacgcggtacgacgaaagagcacttcattcgcgcaacgctagaatctttagcttaccaaacgaaagatgtattatgcgcaatggaagcagattcaggtattgaactgaaaacattacgcgttgatggcggagcagttaaaaataacttcttaatgaagttccaaagtgatattttagatgttcctgtagagcgtccagtgatcaacgaaacaacggctctaggtgcagcatacttagctggtcttgcggttggatattggaaaaaccaagatgaaattaaagaacagtggcatatggacaaacgctttgaaccaacgatggaagcgaaaacaagcgaagagctatatgctggatggaaaaaagcaattgaagcaacaaaagctttcaaataatcataaacagtgttataatggtgacaagttaataattcggtaggagatttggagagaccacaacgcgctatagaggcgaaatctatagcggagtttgtggtctcttttttcgttatcaaagggaggaattaccatgaaattttcaagtaaacaacgtaaagacgtattaaacggagtaaataaacaagagttagatgtgatcgtaattggtggaggtattactggttctggtattgcattagatggagcaacacgcgggttatcaacaattgtgtttgaaatgcaggactttgcagcaggtacatcaagtcgttcaacgaaacttgtacacggtggtctacgttatttaaaacaacttgaagtgaaaatggtagcagaagtaggtaaagagcgtgcgatcgtatatgagaacggtccccatgtaacaacaccagagtggatgttacttccattccatacaggcggtacgtttggatcatttagtacatcaattggtcttcgtgtatacgacttcttagcaggtgtaaaacgaagcgagcgcagaaaaatgtttaaccgtgaagaaacgctgaagaaagagcctcttgtaaaaaaagaaggattaaaaggcggcggttactacgtagaatatcgtacagacgatgcgcgtcttacaattgaagtaatgaaagaagcaattgaacgcggtgcaaaagctgttaactacgcaaaagtagatggtttcttatataaagatggaaaagtatgtggtgtacgtgtaatcgatttactagacggtgaagtatatgaagtttacggtaagaaaattgtaaacgcagcaggtccttgggtagatacacttcgtgaaaaagataactcgaaaaaaggaaaagtacttcagttatcaaaaggtgttcacttagtaattgatcaaaaacgtttcccattaggccaagcgatttacttcgatacaccagataaacgtatggtattcgcgattcctcgcggcggaaaaacttatgtaggtacaacagatacgttctacgataaagacgcagctgtaccacaaatgacaacagaagatcgcacatacatcattaatgcgattaactacatgttcccaagcgtaaaaattacggaaaaagacatcgagtcaagctgggctggtgtacgtccgttaatttacgaagaaggtaagagtgcatctgaaatttctcgtaaagacgaaatttggacttctgaatctggtttaattacaatcgcaggtggtaaattaacaggataccgcaaaatggctgaaatggtagtagactacgtaacgaacttactacaaaaagaaggtcatagcgcatatccgaagagcgacacgaaacatatgccaatctctggtggacatgtagatggttcacacggattcccagcatttgttgcgaaaaaagctggcgaaggtacgaaatatggtttaacaacagcacaagcagaagaattcgcgaaattctacggctctaacgttgacgtactatttgacttagcgaaaaaacataaagacgaagcgaaagaatacaacatgccgcttgacgttctaatccctcttgtatacgcaatggattacgaaatgacagcaaaaccagttgacttcttcgtacgccgcagaggcactgtattcttcaatatccactgggtatacgagtggaaagaagcagtaatcaactacatggctgcgaaactaggctggagcaaagaagagcaaatgaaatacacagcagaattagaaaaagcattaacagatgctgtaattcctgtagatcaacaagagcaagcagctgcgttagcgtaaaatagagaactacctgaaggggagccttgaggtggttctttttttatggaatattcttctaactataagaaagctcgtaagtggtatgttatgacctttcttgtttgggagatattacatttactaactttgtctgatgtttttgatgtgtggcggattgctataaatatgctcggtgcgtcggtaggatatcttttatttataagcatgatacaaatagataataaatttaggataatgcgcaagaagatatttgaaaattagcttgctattctgtagtttaaattatacaaatttagtttgatggtaatagagtattgctgaaaacataggtgctatatagtgagaggattttttatattcgtaataggtgttgttccttgtttactcatactgttatgaagcgggtacataatccgtctttattggtgctataaatgatgagagcggcacagctgaacttgaaaaagtctagctgcgttagcgtaaaatagagaaccacctgaaggggagccctttaggtggtttttctcttgactaaaaataaataaaatgtgttacaatgatgatagagtatgtagtgtgaattttgcataaaataaaaaagacagaagcctgagaaacttctgccttgtgtaacctaacttgctattgtggtggtagtaggtgcggttataagacaattacattaacgttttagccgagaaccgcccttaccttttccacgaagcagggtggttctcgcttttttgtatacagaaattagccacggaccgacgtatcttctaccgatgacaacgccagctccggttaggataccatacactaatttaattataaacatcgcgattatattatcacctcccccctttttcaaaatggaagagatgattgccacacctactagttatagcttattaagttacattttaattgtattatgttttaaaatagggaacaagatatatggatgaaaattcctgtttttaagcagagcattagtgtcaggggaaaagaagtaaataaatattcataaaaaaacggtatggacattaccatccgtatttttttatgtatttataaaactttttcatacagtgcgtcgtctaatatatgggaaggaggaaatgatgtggatgaattaacggtagaagcgtttgaaatagaagataaggaactccttatcgatgaaattatgaacaagtatggacaagaagtcctgcagcttgtgtattcatatgtaaacaataaagagattgctgaggatgtaacgcaagatatatttgtgaaatgctataaatttctgcatacatataaagggaagtcgaatgtgaaaacgtggttatggagaattgcgattaatcaatgtaaggactatataaaaagttggtataacaacaaggtgatcgtgacagaggatgaagctgcttatatgggggttcaaaatggtagtgtcgaacaaactgtcattcaaaatgcggaggaccgtgaactggcttctgcagtaatgaatttaccgataaaatatcgagaagtcatttatctattttattatgaagagttatcaattaaagagattgctatagtaatagacgtaaaggaaaatacgataaaaacgagactgaaaaaagcgaaggagcttttgaagaaaggattggaggaataatcaaatggaagatcaattaaaaggtctgcgaaaatcaatggagaatacaacgtttaaacatttgagtttttctgatcaacatcgaaagcaggtgcgcgaaaaaatcaatgcttcaaacgagaaggaagaggacatctctttagcgattttacaactcctcagtaatgaaaaaacagggtacgaattgtcacagctactacgagggagagggattcggaaattcgaaggaaatgaagggtttttatataccgtattacatcgtctggaacagaaccgtttgatccaatctagctgggatcatgcaggagcgaaatattatcaattaaacgataaagggagaaagatgctgcgaaaggcagaaaaaaatgctacgaaggtacaatttatattaaaaggcttagtacaggagtgaggagaaattgaataaaaaaggggagcgttttgtaagcgaagttacgaattatattaaatcaaaagaagcgaaagattttgtagcaacggaactagattttcacctaaaacaggcgaagaacacatggatagaaaaaggtttgagcgaggaagtcgctgaaaataaagcggtggaacaaatgggaagtccgattaaactagggcaagaacttaataaacttcataagccaaaggtggattggtttttacttattttattagtagctgctatgggattaggttttttaccaataatcgcttttgggcatacggatgatttactaatgaacaaagtaatttttgtaattcttgggattgcaacagccattgggatgatgttgcttgattaccggaagctagagaggtttggatggctgttttatacaattggaatacttatcttgttagctataaaatgttttccgactatttctataaatggggaagcgttaatgaaaattggtcccatcaaaattgactgtttaatgacgataccattcttttttctagcctgggcttctttttttaataacagtagattaaagtttatacatcttttcatgttgtatttattttctttatatctatttttaacgacatcgattatggtgccaattttcatctatatgacgatggtattcgttatgctttggtggagtaagataggaaagaaaacagcatggctcattacaatgttaccaatttttcttcttattattagagatctattttcctggtctgctgtaaaagaataccggatagctagaattttagggtttttaaacccagagcatgatcaatggtatttacgtttaaaagaggcaatggcatcggcaggttggtttggtacatatggaaatataaagtctatccctgctactcatactgattttgtatttgcaagtttgacttactattatggatatgtgcttgcgctagttcttgtcttgattttgtctctttttgcagtaagaataatgaatatagcttataaaataaatgatggttatggtaaattactcctcgttggtggagtaactctttttgtattccatttcgtttataacgttggcatgattcttgggatattaccacgtgtttctatatcattaccctttattagttacggcttgataccaactctgtttcatgcatttataatggggattgtgctgagtgtatatcgacgtaaagatattccttttagaatgagaaaaacaccttgatgattatcaaggtgttttcattataagctcaaaactctccgaatcagctccaagtataaaaggactaacctcgccaacgctataaagttgcaattcatgcattgcgcgtgtgcaagcagtgtagaacaatctacgaacgctctcatcgctgtacacatctttagaagcattgtaaataataacagcatcaaattcaatacctttcgctaagtaagcagggattacgacaatcccttgctcatactcggctgagttactcttcacgagtttaatattatcgatatgattaagtgcttcgtatgcagctgcgctttcagctgcagatttacatataattgcgatcgtattgtgctgctctttttgtagttcagcaactttggcagtaatacgttcgtgcagttcgttgacattcgatactttcgtcactgtaggtttctcgccgtcacgttcaaaggcgtgaatgttcttgccttccggtacgagagcacgtgtaaattcaataatcggttttgttgagcggtagctacgagttaagttaatgccgtttgtttcgtctggaccgtataaatttgtaagtgtatcgaaattaaccgtttcactcgcatgagcaaatatcgcttggttaaagtctccgagtacagtcattcttgcagcagggaagagacgttttaaaaactcgaactgaaacggcgaataatcttgcgcttcgtctacgagtacgtgtttaatcgatctgttcgtttggaagccttcaattaattcttttaaaagtaagaatggagtcgcatcctcgtaatatagttttccttcatcaagcatgtttactgttaaggagcaaatgtcatcccactctttcggttttttctcagtaacccatgatgcatctgtgaaaagttgtttatatatgcctgtgaaattgataaagcgtaatgtttgaacgcctttacgcagtggcttcaattttttacggacaatcatacgtccaagtactctcgtttctttttcaaaatcattaaaggagttgtcgtcaaactcgccttttttctgtaaatatttataagctttttggtattcatctttactaagtaattcaatttcttcttctacccaaggctttttcagttctgctttttcaagtgcatctatttgcttgtttagccaatccgttaacttctcaattcgactatggaagcggagggaggagtcggtattgtaaaattgttctgtaatttctttcgcagaaacaatcagtttccctctaaatttcattcctctaaatagcatgcctgaagattcaagagattgtctgtacgctctaatcatctcgaaaaattgagtagatgccttaaatcgaatgctcgcatttctcgttttataggtaggattattcgtttcagttaacatatattctaattgttcataaggatcttcaacgtcaaatgacttacttagtctatggtttaaatattcttggaaagtcacttgctgcatattttcttcgccgagttcaggtagtacgttagaaacatagctgttgaacatagagttaggggagaagagaataatttgatctgcttttaaccattcgcgatatttatatagtaagtaggcgattcgttgcagggcagctgacgttttaccactaccagcagctccttgcacgataaggagtcggccttcatcgtgacgaataatttcattttgctcgcgctgaattgtagcaacgatgctctgcatatgtttattcgtcccttttccgagcgcttgctgcaagatttcatcaccaattgtaaggctcgtatcgaacatagaatcaatctcgccattttgaataatgtattgtaattttttctccacattaccgtggattacgccgcctggtgtactgtattcagccggtcctggtggataatcgtagtacacactcgaaataggtgcgcgccagtcatatataaggaagttttctccgcttgcatcagtaagtgtagcgacgccgatataaatttgatccgcggcagattctccttcttctttgaaatcaattcgtccgaaataaggtgctttatgcatgcgtcttaatgcggcaagtcgattaaaggtgtgcttatgggtaatttgtgtgacagctagtgactgagcttgttgtcttaagttgataactgtttcaagataatcatcgaaagtatcagtattcactttcacatcatcccaaaagtgtttacgaatattgattacttctgctcggcgtctgccagtttcgttttccagtttatcaatttgctccgtaattgtttcaattacggtatccaatcttttttgctctagatcaagttttttgttcatacggtaagcactcctttaaaagtgaaaaatagaggttgactgaagatgtgttttggtgtacaattaagatacggataaatacgttccttttgttttgtaaaacgtgtttctgttctaatttaacatagttttttcatttaatcaatgataataagataaaccttggttctacgtggcgtggatcaaggtttttttgtgtttgaagagggagtcacgcttgttgtcgttttttgtcggtaagtcgatatatttcgaaaatcgctgatataattggagttgcgctgatatattttgaaaatcgccgatataattggagttgcggtcgatatatttgaaaaatcgccgatataatttcatttaccgaatctagattaactactgagagaagaggagataaaaaaagctcgggcctaagcccaagctttttacttcattatttcttttcgtcttttttatcgtcagctttttgctctttgaaaagatcttttaaatctttatcgtcaacttttacgtcagcttttttgatttctttcatcataagatcgttcataaattgagcatcttgtgttttttcttgaactagtgcttttttaatatcagcttttgctttatcgaaagttgcatctgcgtgattatcagttactttaataatatggtaaccaaattgtgtttttacaggttcgcttacttcaccttttttcaacttttgagctgcttcttcaaattcttttaccatttttcctggtccgaagaatcctaagtcgccacctttttcttttgagcctgtatcttcagagtattgttttgctaattcttcgaaagatttaccttgagcaagttcatctttcacctttttagcagtttcttcatcttttacaaggatatgacttgctttaatttcttttttataatcctcgaattttgcttttaaatctttatcagtaatcgattgttcaaccgctttttcttgagctaattgagcgcgcacactatttttaatagtttcttctttaataccttgttgtttcattagtgtatcgaattgatcaccgtattgttttttcatttcatcgaactttttgtctacatctttgtcttcaactttgtagtttttaataagtactttttccataaccatgttatttagtgtttgtttaccagtttgtgaatttttcatttgttcgtagaattcttcttttgtaatgtcaccagctttagatgtaacaattttgtctgatgatgatgttccacatgctgataatgcgattacacttgttgcggctaaggcaagcatagctttcttcattcgataaacactcctactattatgtatttttaatttatcctacaccgatgaattttcattcataagagcccgattaagtctcactgatacttttgcttttttatattggtaaagcgcgcttaacagggcttaccgtggctgaggataaagttttgatgaatgttttgttctatagtataagcaatatgtacaaaatttaatatatcatatttcgacgcattttcatattgataaagaaaaattaaccagtacgtgtcagattttgaaagtgtgccatattgggcgtatgccgcatatacagaatagaggaggggatggggatgaattctcaacttattttattacttgtactgtttattttattggttattgtaggtataatttgcttatagaggaaaaaagtgaggaaggggctttccttcctcactttccatgaaatataatttctatataactagaaattaataaaattgttatacatacattaataacccgaaagacaccgggctggcggctcgcagctatttgttttcgttcacacagtgtatgtgtcatgaaattcgtgtaaaatataacaagaagtgcgaatgcgacaaaaacaactgttataagtgtcatgaggcgagacctccttttggctaaaatacatatacatatattgtatcacacgatattttgttcgtgttacaaaattcagaaatagaagactttgtgttagaaagtgagggagaaaatggacgttgttagaagattagaacaagctgaatactatgtagacttattatttaaaatgattgatgaagagaagtgtccattttattctttgatcataaagaaaaaagctcgtaaaaaagatattgaacgtatactaaatctttgtgaaaaactgaacgatcaatatgtagtggagaaagcagaagggcttcttttgttcgatgcgctgttagatcaatttgaaaaagcgcttccacatcagctcgaagtacacgaaactgcggaagcgctagcaaaacaaggtttatttaagccgcttatgaatgaattcttaagcatgattgcgaaaaaataaatagattatttcttaactaacttttgatcggattctgtaaagttctcttcaatatcttctaatgatttctcaaaaatatcgataaagtcttgtccgtaaatgttacgcaggattgcaatcagttcgatattttctgggaacttcccataaaaattacgaagtgcaagagccccattaaacactgaattattttcaggatcatactcttccattaagcgaagtagtaattcttcccctttgtctgtaatttcaatgtacgtatttcgtttatcatcttcctttttcgagaatacaagatagccgcgttcttccagctttttcgagaagttaaacgctgttgatacgtgcataactccaaacttagcaatctcagaaatagaagccccttttaaatgataagcgattgttaaaatatgatgttcattaatatttaaatcgtaaggtttaatccactgctgccaatctttctctacacatttccataacgctttcgataattgagcaatgcgttggctgaaaatcatcgcttcttttaccgagtaatctttttctccacttttcatttactcacccactttaacattcttttttcattactatctattatgccagtaaaataaaaattaataaagtctttttgtgagaattgtgaaaatttttcggaaaaatgacattctatacaaatcatgcataactatggaagcgttttatgagtcgtgaatacatacgttgtccttacatgttaagtgataacatatattgtaaatgcataaaaacacggcatatctatatgatatgccgtgtcaaggtcaatttatataaaaaatatttgttatatgcaaaaaactaagcaggaatttgtttacgctttttctggaacagcttcttgtagtttctcaattgacttttggatgtccaaaatttctttctcaatatggcgcttgttttgagaaatatcttgcttccagttagaaagcgtgtcttgcatgtcatcttttaattcttgaaacacttctttaccttctgaagcagtttcaataatttgacgctttaataatttcgtatcagctgtaatatcagctaaagtctttttaatatcatttcctttttcttttaacttgccgcgcatgtctttaccagaagaaggagttgagaaaagaacagctagtccagcaactgctccgccgcaaataacacctgtaataaaggatttagcttttgacataaaaggagacctccttattttttgttcgtattcatgatgggaaaaatatgcatatctttcttatatgtgctatgcacaaacaatcatccctgagcattttaagtaaagaaacaagccatgcggaatttgatgacttcagggaactggcttgttatgtattacgccttcttatagtgtcattatttcacactatttgcaattgtacttgcgatgttttgtaaattttccatagtgtattcattttggtgtgatttccaaacagcaccgaaaccatctttttcaccgtagcgtggaattaaatgaaggtggaagtggaacacagtttgtccagctttttcaccgttattgttaagtaggttaaagccaattggattaaactctgctttaatcgcatttgcgatttttggaacgacagaaaaaatgtgtgatgcgatttctggcgttaacgcaaaaatgtcttgtttgtgaacttttggaataacaagagtatgtccttttgttacttgactaatatctaaaaatgcaagcacatgttcatcttcgtatacttttgagcaagggatttgcccgtcaatgattttacaaaaaatacaattgtctgctgtatgattcattgatctcatcctttcaaatatccttagccgtattttaccataattatataagagaacaaacacgaaaaacaggaagctgactcagcttcctgttttctgaagagggattgaaaaagcattatcgtaatttacgtttcgcagacacctcatttatttaagaaatgcacggtaaatcggctaaagtttctgccgtagacaccccattttcaagtgaaatgaattgcaatcttttttaaaatgaaattgtttattttttaaaacagtatatgctctttcagagacaccccgtttcgaaaatgaaacaaatgatctggttatgtgtaaatttcattgtccaacttggacaccccatttcatgatgacttcactatgttgttgtactcatcaattggtggttgctttttcaatgtgttccttcttcaataattatgatgtccgctttcggaaaaatatatgctaataaatttaaaaaatttttttgagtacatggatactatgtagtacagcataatttttggtaagatgaatatagaatgaatactaatgaagaaagtggtgtcgtatgagcgagttattgcgtgtagaaaatgttacaggaggatatacgaaacgacctgtattaaaagacgtttcgttctctgttaataaaggcgaacttgtcggcttaatcggtttaaatggagctggtaaaagtacgacgattaaacatattatcggtttaatggaaccgaaaaaaggaactgtcacaattaatgggaaaacaattcgtgatgatatgacagcgtaccgttctagcttttcattcattccggaaacgccagtattatatgatgaattaacgttagaagagcatttgaaattaacagctatggcgtatggcattgatgaaaaacaatatgaagaacgtgtaggacaactactacaagagtttcgtatgaaaaatcgtttaaaatggtttccatctcatttctcaaaaggaatgaaacaaaaagtaatgattatgagcgcatttttagtggagccatctctttacatagtagatgaacctttcgttggattagatccgttagcgattcaatcccttcttcaaatgatggaccaaatgaaaaagagtggtgccggtattttaatgagcacacatattttagcgacggcagagcgttattgtgattcgttcattattttgcatcaaggtgaagtaagagcgaagggaacgctatctgaactgcaatcacagtttaatatgccaggtgcaacgttagatgatatttacatcgcgctaacaaaggaagaagattatgaatagcacagcgttatggaaagaacgatttcgtcactttctaaaagaagttcgtacatatagtaaatacgtatttaatgatcatttgaaatttattttcgtgttcatcattggtgcgggagcgtattattaccagcaatggttacaaacgttaacaccttcgtttccggcggcgctcgtaatggcagtattaattggactcgtgttaacggctggatccattcaaacgttattaaaagaagcggatctcgtttacttgctgccagttgaacaaaaattaaaaccatactttacaaaggcgtttctttttacgtttatgattcagttgtacataatcgcaattgtagcggcagcgcttgctccgttatacttccagcaaatgaaacaaacaggagcggcttacatatggattgtactcgcgtttgtcatcgtaaaagcgtggaacttattcgtagcatgggaaaagtcatttttaacagatcaaaatatacaaagagctgattggttcattcgttttattttaaacggcttatttgtttatttccttttagagcgtacttccgttatgtttattggtggaatcgtccttctcatggtgttatacctcgtagtactgcatcaaatggtgaagggaaagccgctaaactgggagtatttaatttctgaagaaggtaagaagatgatgctgctgtaccgcatcgcgaacatgttcgttgatgtaccagcattaaaagaaagagtagcacgcagaaaatggctcgatttcattctttcgatgattggtgaaaagcgtacatatttatacttatatacgagaacgtttttaagatcaggtaactattttggattatatgtgcgtttgctcgctcttggaggagttattttgtacttcattccgtttttatatggacgatttatcgtaagccttattttcctatacttaatcggttatcagctcttaactttatggaaacatcaccgcatgaagatttggcttgatttgtatccggtagggggagaagagaagaagaaagattttcttactttattaaacgcgattctaatcatcgggagcgtaatctttacagttatatttgcactagcaacgaaagatttcatgatgacaggaattttacttatcgtaagcatattatttagtatcggtttcgtttaccaatacggggcgaagcgcattgagcgtttaaattgaagggaatgaacctatgattacatatgaagaaaaggttataaaagaactggagcagtggaaagctacatttatgaaagattcttctatgatgacacggttctcaaagaaagtgcagacgaaggtgcaacagctcattccggcgaaagtacaaaaggtattaacagagacgattcgtatgatggtgcaaacaatcagcgccgggtcaaactttataaagccgaagctaaaagagacgacatggtcactgcaaagacgtgacgatgaagttcgtaaaaaaatggatgagtataaaaaaatagcagcggcagaaggggcagggacgggggctggcggtattctcctcggtcttgctgactttccgcttttactcggcattaaaattaaatttttattcgatgcagcgacattgtacggatttgatacgagcaacaaagaagagcgcctttttatccttcatgtttttcagcttgccttttcaagtgacgatcaccgaaaagaaatatggaaagcaatcgaaacgtgggatacagaagaagaaaatcatatggactgggaaaagttccaaacagagtaccgagactatatcgatttagccaaaatgctgcagctcgtaccaataatcggtgccccggtaggcgcatatgcgaactatcaactactgcaaagactcggagaagtgacgatgaattgttatcgtatgcgattgctgaatagggattaaaaagaaggcgtcctacatgtgtaacgtaggacgccttttcttagaagccaagtccgatatagctaactccaactataatcaatacgataaaaagtacaatgattaatgaaaatccgctcttaccagtttgtcctgcttcaccgccgccattaccaccactaccgccattaccaccaagccccatatgatatcctccttattgttatatgttgcttttactttataactttctgtattttctgataaacaccttctgtagtgctaactaaattgaaaatcatttcgttttgttttataatttacttaccgaccggtaagtaaaaataagtgaggtacagtatgacgaagaatttacaaacatcgcaaaacattgtagaggcttcatttaaacttatggcagaacacggcattgagaagatgagtctttccatgattgcgaaagaggtaggtatttcaaaaccggctatttattatcatttttcttctaaagaagcgttaatcgattttttatttgaagaaattttctctggatatcatttcgtgagttatttcgataaagagcaatatacgaaagaaaactttgcagaaaagttaattgctgatggtttacatatgctctctgaatatgaagggcaagaagggatattacgcgttatcaatgaatttctcgtaactgcatcgcgaaatgaaaagtatcagaaacgcttatttgaaatacaagaagatttcttaaatggtttccacgatttattgaagaaaggcgtagaacttgacgtagtgtcacaacatgaaacggaagaaaatgctcatacgctagcactcgtgattgataatatgagcaactatatgctcatgggattccagttaaagtataaagaaatttggattcgaaatgtgaaaaacgtaatgaaggaggagtaaagatgaaaatgcaaaaaaactggtggctcggttttcttggatttattggggtttataaaataccaggtatgattgaagcttttcaagcggatggaaattggatgaagttaatcggtttcatttggctactttggttcggatattttattcctgagaagaaagaagattgaatttcaattttctgtaaagttacgtaaaatatagattgagagtattcatatattagattactagatttggagtggttacatggatccattgaaaaatgaaattcaccctgacatggtcaaggtgtggaaagcgcgttctttaattgagctaggaatcagtattatagtcattttggcatatcttttctttatgattaagtttaattggtgggcttggattttctatgtgctcatcggattaacaattgtatatacaccgtttgattactttacgtttccgaaactacgtcaacgttattacagctaccaactaaatgaagaagaacttgaaattcagcatggtcttttcgtcgtaaagcgcgtattagtaccgatgattcgtgtgcagcacgttacgattgaacaagggccaattatgagaaaatacggattagcagaattacacatttcaacagcagcaacttctcatagcatcccaggtttaacgatgtatgaagctgaaatgttgaaaacgaaaatcgcagaattagcgaaagtgagtgatgaggatgtataagaggcagcatccaatcacgatgttattagaattaaaaataacagattttataccactcattatttttctttttagcttaaggggaaagtttccattttggtatttagttcctattggttttgcgttgatcacaattatttcagctatcgtaggctggtattacaaagtatactgggtcgaaaataacgtattacatgtgaaacaaggtctctttgtgaaaaaggagagctacttaaataaagaacgtgttcaaacaattaatacaagttctaacgtactataccaaatgctcggtttgaaaaaaattcagattgaaacagctggcgggggcgatgaagcagaagttagcttagctggaattacggtagaagaggcgacggagcttattactttgctaaatgagccaactccagaagtgaaagcagaaaaaacgttagacgaagcagcagaaaatacagtagaaaaagcaattgttacagaggaaaaacaaacgacagagtacaagttaacgtggaaagagattttaatagcgtctgttacatctggtcaatttggagtattgttctctttaatctttttcgtttatcaccaagtagatgagtatattccgaaatggataaaaaatagtgtgacgtcatatgtaatggaccacgatatatatggctggatttacatggtagctattttacttgtcgtttcttggatgatatctacaattggctacgcgttaaaacacggtaacttcacagtgaatcgaaaaaatgatgaagtccgtatttcgcaagggttactggagagaaaagaactcgtactaaaattgcaccgcattcaagggattacgataaaagaaggcattttacgccaaccgttcggttattgtgctgtgcaagtagaagtcattcaaagtgaagggaaagaagaaaaagttacactgcatcctatcattcgaaaagatcgagtgcaacaattactcgcgcatttacaattaccatacgaactgaatgcaagtattacttcgttaccaaaagcagcattgcgccgctatctcattgatagttttatctttttcgctatgctcgcaatcccgcttactggaataagcatatactttgaaaagtattacatcatgtgggcattactaccgctcgcaatccttatctttacacttggatacgcaacatttaaaacaaatggctacagtgttaacggagaacaaattacacttgtctatcgtagcgtcggaaaatatacaggacttattagaagaagacacgtccaatcaatggagaagacacaatcatatttccagcgccgtgcggatttatgtacgtataagttttcgagtgcatcatctagttataaaatagagcatacgagagtagaagatgcggagagaatgcaggattggtataagaagaaaataaatgagatgtaacttgagaaagcttgcctattatgaaaggcaggcttttttgttatagggaaaagagtcgtttaatccatatattagtacaactacagcacacatgtatcaatacgtatgaaaaaaggtaatatgcttctgttttaggaaaatatgtgggatttttgatataaatggtataataaaatggaaatagtattaggaggttatatatgataagtcagttgaaaagagaagcacttgatgcattaaaaggaagatggggactagcggtaggggcaaccttattaattggaatccttattggagctgttgaaatgctaacaacaggtattttctcgatattttggggttgggaagaagcaagtgattcacttacagtaagtattatagtaatgcttgttattggtccattaacaataggtgcctattatcttgttttaaatgcaattcgtgggactgatgctcgcattggtcatatatttagatggtttagcgatggaagtaagttgatgaagtcgtttttaacatatttactaatgtatgtatacttgactctatggacattacttcttattattccaggtattattaaatcattttcttattctatgacatattttattttgaatgatcatccagaatatacagcgaatcaagcgattactgagagtcgtcatatgatgaatggacataaaatggattactttttactatgcttaagtttcttaggttggttcattttaagtattcttactgtaggaatcggtttcttatggttagcaccttatttctacgcgacatcagccgcattttatgaagagatttcaaaagaatattataaaaaagaaggcactactttctaataaaacatataaactatctaccctaaagaatgtagggagcagatagcagatggtttaggtgttttgatatttgtcctattttcgggattcacttcaggataaggtatagatttttatatagaaatgctaccctctatgttttatcatagagggttatttttttatgtaaaaatgataggaaataatgaataatatatgtaaagaaaaaagcgaggtgaatgagagtgagcaaatttttaataccgtattcattttctatattaagtttctttatttcagcaacagcacttgatttatatgataggatgggaaacgatagtgagctggtttcgccgaacataattggaaagataattcaatctactgcgcaaatgggagtccttacattgtatttcggagtacctattattttaggtggctgtctacttggtgagctattgtttagaggtatcattttacgatttaaactaagctatattatatctttattattatatctatttttagcttttagtattgttttcgtaacggtaggcattccaactacatatgaagattctaatacatttttcatggggataactatgatttgtgctgttacattctttgtgagtcggaatatatgggaaaacaagttaataatggagtgacaaaatgaaatacacctgtccatgttgcggatataaagtttcactttattggatcagttagaaaaccgactagtgaagatgtgaaggatgctagttggcagcgaatttgttaagtagaatgttattactcaatttaatgggagtaataacattttttatttagtactgaaagaattactgctgtcttaaagtaataagaaggactaaatcggtaaattttattaatggatatattttcaataaatacaaaagtatagatgtatagtcagctttgtgtatttaatgttatcatattgaatgatatggaaatttttaatagaataagtaactaaaaattcaaaggtaatgaagcttttgttgtataaagaaaatacttagtagtaatcaacaatattaaaaataagattcgtatttatataaatttagtagaaatggggttttaaaaaggaatgagtataagcataacgcggcaaaagattttggcggccgcttctcaaattgtacaatgtaaaggggttgctaaattaactttagaagcagtggcaaaagaggcgggtttaagcaaaggtggattattgtatcacttttcaaataaagaagctttaatagaaggtatgatagtccgaggggtagaggattatgaaggggccatttacaataaagtagcggaagactcagagaggaaagggagatgggttcgctcttttgtagaggaaagattaagtaatgagagaagaacagaagagttgtctagcagtatgatggcagcactcatgttaaaacctgaattacttgagccattacaacaatcatttcagcaactgcaaaaaaatatagaaaatgatgagatagattcagtttgtgcaacaattattagattagcagcagatggattatggtattcggaatatttaggggttggaaggctaagccccgagttaagagaaaaagtgattcaagctcttattagtaattcatataaatagaatatgcgaactatataatgagaaaataattcaccattgcttctttaatgtagtggtgaattattttttttattagaaaaatagaacaattttatagagtattgaattataaccgtccagacggtatagtaatatttggtttaagaggaaaatgaaacaaaaaaagaataaaagatatttttagcacactattcgaaaggataggccgcaaagcttagagtctacggtaatacatattggttactaagatcgtctggttgcacatttttgatgcaaccggacgatctttttttgttatataaatataaaaatttaggagggaactatgcaaatgaaaagtactaaaagacatatttcaatggtttcattagtttttctagtattattttcagtgctgaatgtgtgggctccagttattcaagctgctgtgatgaaaagtccagtggacgaaattaatatttcccgtactgatggcacgacatctgaaccatatcaagcctcagatggtatgaaagtagaagtgaagtggtcagctaaagaaaaaataaaaagtggagatcaattcacaattgatatgccaaaagagtttcgaaaagaccttatgaatatgagttttcctttaaaagatgctgaaggaaaaacagttggtacatgtgagatgaaaaagggtctattaacgtgtactatgggtgattacgtagaaggaaagaacaacattaaaggttctttattcgtagaattctactttggtctagaagcatatgatggtgttaaagaaattccattagaatttaacgttgatggtcaaatcgtaaataaagaagtaaatgtaagtaatacgacagagagaccgaagccacaacccaatacggaaaatctattgaaatggggttcttataatcaagaagatccgtctattgctgattggcttgtatatgtaaatgcaactggaacagaaatgcaagatcttaaattaacagatacattaggacctgggcatgagttaattacagacagcgtagtattagaagaggctgtatttgaagatggttatgcaccaacaaatattaagccagcaaatttatctaacattaaaataaatgcaacaaagactggatttacaattgaatttccagacagttcaaaaggctatattttaagatataaaacaaaggttacaaatcctgctgcaaaacctcataaaaatactgtgaaattagaaggtaaaaatattaaaactgaagaaaaagtaggacaagtatttgtgagtggtgggggaggatccggttcaggtgacaataatccacctagcattgaaaaaaatatagttgatgagaatgacaagcttgtagagaatgagcagctaacacaaatggatcaagttattcaataccaagttggtacacatataccgaacgatcctcctaaatacacatctatggtaattagtgatgatttagaagatgttttagaagtattagaggcaaaagtgtatgataaaaatggccaagatattacttctaaagggacgttaaatatagataaacaaagaagtgaagtaacatttacgtttggtgagaattttgattataagtcatatgaagaccagataattaatcttagtatcaaggcgaaaattaaaaataatgcagacttatcttcttacgtagataagaagattcctaataaagcggaattacattttgatgataaaacattaacatcaaaagaagtaactattacaccgcctgaagctccaaaagatggtacagtatcgcttcataaaatagattctgagaatccgaacaaagggttgaaaggtgccgaatttgaagttcgaaatagtgcaaatgaagttgttgcaaaactgacaacggacgaaaaaggtttttcagtacctcaaactttagctcctgggacgtataaagtttatgaaacagtagcaccagaaggatatcaaaaattaacaagcccagtagaggttacacttcaagctggagaaacaaaaacaattgaaattaaaaatactgtgcaaaagggtcaaattgaaataaagaaaattgattcggaaaatggtgaaaaaccattagcaaatgcagagtttgatatagtaaaagacggtgtagtagtcgaacatattgttacagataaagatggtaaggcaatctctaaaccgttagcactaggaaaatatattttaaaagaaacgaaagcgcctgaaggctaccaattaaaagaaacagagttcgaagtaagtgtaacaggggacggcatattcccaatacaagtggaaaatgcaatggtagacaaaggtaatatagaaattacaaaagtggacaaagaaaacggagcagtattagcgggtgtcgaatttgaagtccaagatgagaaagatgaagtagtaagaaaagtagtaacagataaagatggaaaagcaaatgtttcagatctatcagtaggaaagtacaaattagtagagacgaaaagcttaccaggttataaaaagctaacagaaccagtaccatttgaaataaaaaaaggtatgacaaaagctttagcaataaaagtagaaaacgagcagttagacaaaggctcagtagaaattacaaaaatagataaagatagtcaaaaagtattagaaggcgtagtcttcgaagtgcaagatgagcaagaaaaagtagtaacagaagtaaaaacagataaagatggtaaagcaaaaatctctgatttatcagtagggaagtacaaattagtagagacgaaaagtttaccaggctacaaaaagctaacagattcagtatcattcgaaattaaaaaaggtatgacaacagtcctatcgttgaaagtagaaaatgaacagttagataaaggttcagtagaaattacaaaaatagataaagacagcaaaaaagcattaaaaggcgtagtttttgaagtgcaagatgaagctggaacagtagtaaaggaagtaaaaacagataaagatggtaaagcaaaaatctcagatctattagtaggaaagtacaaattagtagagaaagaaagtttaccaggctataagaaactaacagatccagtatcatttgaaatcaaaaaaggcatgaccgaagttctatcattaaaaatagaaaatgaaatggtagatacgggaaatatagagataacaaagatagataaagataataaagcaccgttagcgggagtaacattcatcgtccaagatgaaaagggtaatgaagttacaaaagtaacgacagataaagatggaaaagcaaatgtttcagatttacttgtaggaaagtatgaattagtagaggtagaaagtttacctggttataaaaaattagaaaaaccaatatcatttgaaatcaaaaaaggcatgaccgaggttctatcattgaaagtagaaaatgaaatggtggatacagggaatgtagagataacaaaaatagataaagatagtaaagctccattagaaaatgttgtatttgaagtacgtgatttaaaaggaaaagtagttgcaaaagtaacgacggataaagaaggaaaagcaaacgtttcagatttatctattggaaagtatgagttagtagaagtagaaacaccggcaggatacaaaccactagaaaagccaatttcattcgaaattgaaaagggtagagtaacagcattacaattgactgtagaaaatgaattagtggatacaggaaatgtagaaattacaaaagtagataaagaaaataaagatgctttagctgatgcagtctttgaaattcaagatgaagcaggacaagtagtcgctaaaataacgacagataaaaaaggacaagcacaagttactaatttatcagtcggcacatacaagttagtagaagtaaaagcaccaaaaggatataaacaattagtagatccgattactttccaaattgaaaaaggcatgacaaaatctcttgctttaacagtagaaaacgaaatgttagacaagggaaatgtggaagtaacaaaagtagataaagatagtcaaaaagcattagcaagtgtagtcttcgaagtacaagacgaacaaggcaaagtagtaacagaagtaacgacagataaagaagggaaagcaaaaatctcagacttatctgtaggaaagtacaaattagtagagaaaaaaagcttaccaggttacaaaaaactaacagagccagtatcattcgaaattaaaaagggtatgacagaagtcttatcattaaaagtagagaatgaacagttagacaaaggtttagtagaaatcacaaaagtagataaagatagtcaaaaagtattagaaggcgtagtcttcgaagtacaagatgaaaaaggcaaagtagtaacaaaagtaacgacagataaagaaggaaaagcaaagattgctgatttatcagtaggaaaatataagctagtagaggtagagagcttaccaggatataaaaaactagcgaaaccagtatcatttgaaatcaaaaaaggtatgacagaagtcttatcactaaaagtagagaatgaactagtagacaaaggctcagtagaaatcacaaaagtggataaagatagtcaaaaagtattagaagacgtagtcttcgaagtgcaagacgaacaaggaaaagtagtaacggaagtaaaaacagataaaaatggtaaagcaaaaatctcagacttatctgtaggaaagtacaaattagtagagaaagagagcttaccaggctacaaaaaactaacagagccagtatcattcgaaattaaaaagggtatgacagaagtcttatcattaaaagtagagaatgaacagttagacaaaggttcagtagaaatcacaaaagtagataaagatagtcaaaaagtattagaaggcgtagtcttcgaagtacaagacgacaaaggcaaagtagtaacagaagtaaaaacagataaaaatggtaaagtaaaaatctcagacttatctgtaggaaagtacaaattagtagagaaagaaagtttaccaggttacaaacaattaacagaaccagtatcgtttgaaattacaaaaggtatgacagaagttctatcattaaacatagaaaatgaaatggtagatacgggaaatgtagaaattacaaaaatagataaagataataaggcaccgttagcaggtgtagtctttgaagtacaagacgacaaaggcaaggtagtaacgaaagtaacgacagataaagctggaaaagcaacagtttcagatttatcagtaggaaagtacaagctagtagaagtagagagtttaccaggctacaaaaaattagaaaagcctgtaccatttgaaattacaaaaggtatgacaaaatctttagcgttcactgtagaaaatgaaatggtagatacggggaatgtagaaatcacaaaaatagataaagacagtaaagcaccattagaaaatgttgtatttgaagtacgtgactcaaaaggaaaagtagttgcgaaagtaacgacggataaagaaggaaaagcaaacgtttcagatctatcagtaggaaaatacaaattagtagagacgaagagcttaccaggttacaaaaagttaacggaaccagtatcattcgaaattacaaaaggtatgacaaaagtcttatcattgaaagtagagaatgaacagttagacaaaggttcagtggagattataaaaatggccgctgaaagcaaggaagtcttatcaggagctgtgtttgaggttcatgatgaaaagggaaaagtagtagtgaaagtaacaacagataaagatggaaaggcaaaaatcacagatctatctgtaggtaactacacactagtagaagtagaagcaccaaaaggatatgaaaaattaactaatccaattccatttgaaattacaaatggaatgataaatgcagttcaattagaagtattaaacaaattgaatcatttagcgccaccaggcccagaaacaccagatccagaaaaacctggaacaccagatccagaaaaacctggaacaccagatccagaaaaacctggaacaccgaatccggagaaacctggaacaccgaatccggagaaacctggaacaccgaatccggagaaacctggaacaccgaatccggagaaacctggaacaccgaatccggagaaacctggaacaccgaatccggagaaacctggaacaccgaatccggagaaacctggaacaccgaatccagaaaagcctggaacaccgaatccagaaaaacctgggacaccagatccagaaaagcctgggacaccgaatccagagaaacctgaaaaagaattaccgaagacagggcagaaaatgcctgtggaaccatatatgggagcacttcttgtaatgatgagttttggattactcatattaggtagaaaacagcagagataataaaggtgaaaaggtatcctcaaagtatttgaggataccttttttagcataaaaaaagcatctagcaaaagtactagatgcaaataaaaacacaagggaagacaaagttcttcccttttcccgtatgtaattatatcaaaaaatttataaaaaactagctatatttaaaatataattttaaaaaaagttatatacataaataattgcaatacgcgcagttttatctttctgaaaaatctatttctttatttttgaatattaagactaatgttgataaatcttcagataattagaaaaaatacccgaaaggatatataatattgcttaataaataattttaatgaattacgtatatttcatttggtgtattaattgaatatcataatttttaattttattaagcaagaatctcggttacttattgcatttctaacatagggtgagatagaaaaatacaatagtgtggaggtttttataatgacgtttgttcttagtaaaatgagtggctttagcatagaagaaaaggtacatgaatttgaatctaaaggattccttgaaatttcaaatgaaatctttttacaagaggaagagaatcatcgtctattaacacaagcacagttagattattataatttggaagatgatgcatacggtgaatgtcgtgctagatcttattcaaggtatataaagtatgttgattcaccagattatattttagataatagtaatgattacttccaatctaaagaatataactatgacgatggcgggaaagttagacagttcaatagcataaatgatagctttttatgtaatcctttaattcaaaatatcgtgcgcttcgatactgaatttgcatttaaaacaaatataatagatacaagtaaagacttaattataggtttacatcaagtaagatataaagctactaaagaaagaccatcttttagttcacctatttggttacataaagatgatgaaccagtagtgtttttacaccttatgaatttaagtaatacagctattggtggagataatttaatagctaattctcctcgggaaattaatcagtttataagtttgaaggagcctttagaaactttagtatttggacaaaaggtcttccatgccgtaacgccacttggaacagaatgtagtacggaggcttttcgtgatattttattagtaacattttcttataaggagacaaaatgagagagaataaaataattatgatttctggagccaatagcggtataggtcatgcttgtataaaatactttttagaaaaatcatttcatgtaatagcgcttgatattaataataataacttaatagattatatgaaaacagatatgcctttgaaagtagtgcaaattgatttaagtaatagcgaagcgattcataatctgtttactcaattagatttagaaaagctttctcctgatatattaataaatgcagctggtattcgagagataacacctgttttacatttatccgatgatatgtttaaaaaagtaattgatgtaaatttagtagccccatttatcctttctagggaagtagctaagcgatggtgtgaatcgaaaataaaaggttgtattgtgaatatagcatcggtttctggattaatggctgaaccagagcgagctgcttatgttgcatcaaagcatgctttaatcggattgactaaacagatggctatggaatttggaaagcaaaatataagggtgaatagcatttctcccggtgttattagaactgaacttacagaagaatactttagtaatacagccttgatgtctatgataaaaagtaatcaatctttagatacttgggggttgccgcaggatattgtttcatgtattgagtacttgatttctgatcaggcccgctttattactggttctaattttgtaattgatggtggttggactgctgggaaaaatttataattgagtgtttttgaggaaaagcacctgtccttttttaggctggtgtttttctcactataaaccgagtttttattggagggggattaatttgcttcaaaaaagttttaagcaagagaaaacggtaccggctttaaagatgatagcatcaatggttatctttggatcagttggatttttttcagttcaaacaaacttaccttcgtttgaattagtgtttgtaaggtgtatttttgcgacaatatttttaagtgtatgctggttgcttacagggcaatataaacaagataaatgggaacgaaaagaagttattcaagttttaatatgtggctttttcttagtatttaattgggttttcttatttaaagcctttgaaaatatgtcagttacaattgctatctcggtttatcatcttgcaccagtaattgtactgttaattggaagtatcgtctttaaagaaaaattaacattaatatctatcatttcaatagttgtgtgttttgcaggagctttattaattgctggtatcgatggaagtttctctgtcggttcattaatgtcttcaggtatgatatggggatttcttgcagctctcttttatgcatttacaactttatttggtaaagggattaacaaaatgagtgcgtatgcaatgacatttttacaaacattcttggggatatttcttttaataccatttatagatttagatgcttttagtggcctcactcaaagtaattggacatatattatagctactggttttattcacacagggatagtatattatctgttttttgatagtttacgctatttatctacaaaaacaatctcaatattagtttttttggatccggcagtggcaatattattagatactgtacttactggattccgtccaactttaatgcaaataacaggaattctttttatttttattggtatgactttaacattaaaaaaatctaaagataaaaaactgagccaaaaagaaaagcgaattgaaagcgatgctagtatatctcaacaataatgaaatatattgtgtataaaacgataaaccttacatgaatcatgtaaggtttattttagttcaatataattcatatttataatatataattttcaaaactgaggtatgtttttctttaatctgcttttgattcatatatttttatttgactataaatttacaaaaatgtatatgaaatcttattttttgataatatataagtaataaattcatagaattggagtgatgagatgcagccgttagaaagggagattcattctaatatgctgaaagtgtggcgaattcacgctttaattgggacggcagttatactaacagtcgtaattgcgtatttcttttttatgattaactttaactggtggggctggttgtttggactattagtaacaggagctattacatttattccacttgattattttgtgtttccaaatttacgtcagcgctattatagttacagattaaatgaagaagagattgagattcaaaagggaatgttcgttgtaaaacgcgtacttattccgatgatccgtgtgcagcacgtaacgattgagcaagggccgatcatgagaaagtataatttagcagaattacacatttcaacagccgcaacttctcatagtattccaggtttaacgaaagaagaagcagaacagctaaaaagacaaattggagaacttgcgaaagtgagtgataaggatgtataagaggcaacatccgattacgatattgttaggtattagagttgcgagtttgttgccacttattattcttgttttatttaaacctgatgaacaagtggaaccttggtatttattttatcttttccttctggttgttttattcatcatggctattttttcagcaattaaatggtattttaaagtgtactggattgagaataatattttacatataaagcacggtgtttttgtaaagaaggaaagttatttaaataaagaacgtgtgcaaaatgttagtacgtcttctaacgtcatttatcagatgcttgggcttatgaagttaaatatagaagtagcgggtggtggtagtgaaccagaagtgatgttggctggtattaaagaagacgaggcaaaacatttaatctctttattacataagaaagaaactactgtaaaagaagaaatagaagaggaagaaagcaagacggtttatcagttaacagcgaaagaggttttagcagcagcgattacatctggtcggttcggactagtgttttctggactggtacttctttacacaaagtttgattttgttcttcctgaaggattcacaagtaaagtagaagcgtatgtgatgggaaacggtgtttataaactaattgtaatagcattaattttaatggcaatttcatggattatttccacggctggatatgtgttgaaatatgcaaactttaaaattgagcgaaaaggggaagaaattcgtatcgttcaagggttatttgaaaagaaagaatttgtcttaaaattgcaccgaattcaagcgattactgtaaaagaatgtatgcttcgccagccatttggttattgcgctgttgaagtggaagcaattcacagtattggagcagcaagtaatgaagtgatgttgcatccttttatgaagaaaaaagatgtacagcacctgctcacatatttagagttaccttatgaaattgaggcggagatcgctcacttaccaaaaacagcgttgcgtcgttatttcattatgagctggttaataagtatcatactcacagttctaattgctagcgtgagtatatatttgaaacaatatattgctttattttttattttaccgttatttatcgtgttttcgttacttgcgtatgctagatataaaagtggtggttatgaattaagagaaaatcaactaacggttgtatatcgtaatttttcgaaatatacaggaataatgcgaagaagacatgttcaagcagtaggttataatcaatcgtattttcaaagaaaggatgaattatgtacaactcttgtagcggtagctgggcggggttatgaagtaaagcatatgagaaaaaaagattcacttcgtatatataattggtacaaagaaaaaggaaacaccggtgtgtaatggtgtttcctttttgtgtcatgatttgtcgataagtcgatatattcgaagaaacgctgatataattcgagttgcgctgatatattcagaaaaacgctgatataattcgagttgcgccgatatattcgaaaaatcgccgatataatttcacataccgtggtttccgaactccaaactcaaaaaaattaaactaacacatcaaaagtagtcacaaaagaagggcgagagaaaatactcttttgctgttctgcatgtggatgcgcttgagcctgaggttttccttctacttgcgtgggacgttttttatgagcgttttcgaatgaacgtgattctgtccagtctttaaagttttgctctgtttcccacatcgttaagatgacatatgtatcgttacttaatgggcgtagaacacggatcgcttggaatcctggttcgttttcgataaggcctgcgcggtttttaaagcggttttcaaatacagggcgaccttcgtctgttacagaaatgttgttacaaacgatatagccaggttgtcctttgaattcaccgacagcatctagtacgtcatactgaagtgaaccttctacagattcttctgtattttctttataaaacatattttcctcatcattttttgcagtgaaatgtgcttgttctagaggtgtttcgtatgaaataatagccttcattttaatgcccccttactagtttgtttctattatatcaactctcttaaaaaacttcgaagattatatacataaagatacttctttttcaaataataaatgtaccatcatttggaaagaaggacgatgtatgaagaaagtaaagtggactttattaggcggcgtcgcaacgttcgtagtagcgattgtactctataaacttatcgtgttagctggtggctatatgatggatgaaaagcagctcgttttccactcttcatcacgtatcgttgaccagaaagggaaagaaattacgaaattatacgtagaaaatagagaccttgtaccgatcgagcaaattccgaagtatgtgcagcaggcgtttgttgcggtggaagattctcgtttttatgagcatcaagggattgattatccgtcgatattccgtgctctttataaagatacgttagctagagagaaggtagagggcggtagtaccattacgcagcaactcgctaaaaacgtctttttaactcgtgaaaaaacatttacgcgcaaattgaaggaagtcgcaatttctcttcaattagagcaaaaatatacgaagcaacaaattcttgaaatgtatatgaatcatatttattttggtcatggggcttacggtattcaagcggcagcaaagttgtattttaataaaaatgttgaggatttaacagtagaggaaggggcaatgcttgcaggccttccgaagtcaccaaacggatattcaccgtactattctgcagagaagagtaaggaacgccgcgatctagtattgtcacttatgcataaacaaggctatttgactgcagaagaaagcgttcgttatcaagggaagacaattgctctatataaaaatttagatgagaatgagcttgcatatatgccgtatattgatatggtcatagatgaagccgctcgtttatacgggttgtctcatcaagaagtacttcgcggaggatatacgtttgtcgtacctatggatgaaaagattcaaaaggtagcatataaccagtttcaagatgcaaggaattttcctgggaaagaagaaggggcgcaaggtgctttcttattaatggataatcgtacgggagggattaaagcggcgattgggggaagaaagtacgtcccgagaggatttaatcgtgtttttgccaaaaggcagcccggatctgttttaaaaccacttatcgtttatgcaccagcactagaaacgaaaaagtataatccgtattctttattaacaaatgaaagaaattcttttgaagggtatgaacctcgaaattataatcatgagtattcaaaagaaatgacgatgtatgatgcgattttagagtcggcaaacgtaccggcagtttctctattaaatgagttaggggtagaagaaggaaagcaatatttagaaaaaggaaatgtccatattgcagatgctggtttaagtacagctcttgggggactaaaaaatggcgtttcaacatttgatcttgtaaaaatgtatcgttcatttttagcaaatggaaatataattgagccgcacgttattgataaagtattaaatagacacggtgcagtcattggggaatctccaaaagtagagacgaaaatcttctcgaagcagacagcatggtatatgacgaaaatgctagaaggagttgtgaaggaagggacagcgagagttggtgtatataacggtgcgctagctggaaaaacaggtacaacttcattgccaaatgacgataagggagcaagagatatgtggttcgtcggctatacacctaacttagtaggcgctgtttggattggttatgaccgtacggataaggagcatcagttgcaaggagaaagtgcatctgcgacaaaattgtttaagaaaattttaacgaaggctaatgtagaacataaagagaagtttatgaagcctgaaggtgtggaaacaatcggcgctccgattcgactgcgcaaaattgaagatgtaaaaatgaaactatcatttagccctttcggtttatttaaagcaaaattaagttggaaaccacttccagataacagaattatgtaccgaatctatagagtggagaacggaattcatacacatgttagcactgtaaatggtgctggggaatatgaggaaaagttcgttaacatattttcaaaaccgagcttttacgttgtaccatataatacacaaacgaatcgtgaaggagaaaagtcaaaagtagctaaaccatagtttttctctgtgttataataagaatgttgtgaaaatagtaagcgtttttaagaatgtttgtgtcaatttaatgaacaacgtacataatattatgcattttgtttttacaagctgtatagtaaaaaaagataaatatcgaacgtattcgaagcattggtaaggaagggagcaagggtcttggtaagaactataaatgagacatttttaaaagcatgtaggggggaacgtaccgattatgtaccagcatggtatatgcgtcaagcaggtcgttcacagccggaatatagaaagattaaagaaaagtattctttatttgaaattacacataatccagagttatgtgcttacgttacaaaattgccggttgatcaatataacgtagacgcagcaattctttataaagatattatgtcaccactacctgcaattggtgtggatgtagaaattaaatcaggtattggcccagttattgataatccaatccgttctttacaagacgtagaaaaactaggggaaatcaatccagaagatgacgtaccgtacatactagatacaattcgtttattaacgacagaaatgttagacgtaccgttaatcggtttttcaggagctccatttacattagcgagctatatgattgaaggcggtccatctcgtaactaccataatacgaaagcgttcatgtatgcagagccaaaagcttggtttgctttaatggataaactagcagatatggttattacatatttaaaagcgcaaataaacgcaggagcaaaagcagttcaaattttcgattcttgggttggaacagtaaatgtagcagattatcgcgtatttattaaaccagcaatggagcgtatttttgcagaagttcgtaagatgggtgtaccgatgattatgcacggcgtaggagctgcacacttagtgaatgagtggcacgacttaccgcttgatgtagtcggcttagactggcgcttaccgattgaagaagcacgtgcacgtggcgttcataaggcggtacaaggtaatatggacccttcattcttacttgcaccatggtctgttattgaagaacatgtaaaaggtattttagatcaagggatgaaacagccgggttatatctttaacttaggtcacggtgtattcccagaagtaaatccggatacattaaaacgtttaactacatttattcatgaatactctaaagggcagttagcgaagtaaaggagaattgctgtatgaaaaagaaaattggtttgcttgtaatggcatacggaacgccatataaagaagaagatattgaacgttactatacacatattcgtagaggaagaaagccaagtcctgaaatgctggaagatttaacagagcgttaccgtgcaattggtggtatttctcctttagctactattacattagagcaagctaagaagttagaacagcgtttaaatgaagtacaagatgaagtagagtaccatatgtatcttggtttaaaacatattgaaccgtttattgaagatgcggtgaaagatatgcataacgacggaatacaagatgcaatcgcacttgttcttgcacctcactattctacgtttagcgtgaaatcatacgttggacgagcacaagaagaagctgagaaacttggaaacttaacaattcacggcattgatagctggtataaagagccgaaattcatccagtactgggttgatgcagtgaaaggtatatataacggtatgtcagatgcagagcgtgaaaaagcagtattaatcgtatctgcacatagcttaccagagaaaattattgcaatgggcgatccatatccagatcaattaaatgaaacagcggattatatcgcgcgcggagctgaagtagcaaactatgcagtaggctggcaaagtgcaggaaacacaccagatccttggattggtccagatgtacaagatttaacgagagaactaaatgaaaagcacggttatacttcattcgtatatgcaccagttggatttgttgcggaacatttagaagttttatatgacaacgactttgagtgtaaagttgtaacggatgaaattggtgcgaaatattatcgtccagaaatgccaaatgcatcggacgcatttattgattgtttaacagatgttgtattaaagaaaaaagaatctgtactgtaagaagaaagggggagcctgcttgaggaaaaaagttgtgatcgtcggcggaggtattactggattaacagcaatgtataacttacaaaaaaatattcatgaaaaaaacttgccgattgatacattacttatagaagcatcgggtaaacttggcggaaaaattcaaaccgttcgaaaagatgggtttacaattgagcgcggaccggattctttcttagcacgaaaagaaagtgcagctagattagtgaaagaattgggtctcggcgatgaacttgtaaataatcaagctggtcaatcatttatcctcgtaaacaatcggttacataaaatgccgactggatcaatgatgggaattccaacgcaaattacgccgtttctattttccgggctgttctccccaattggtaaactaagagctggttttgatctattaatgccgaggtcaaagccagtatctgaccaatcactcggacaatttttcagacatcgtcttggaaacgaagtggttgaaaacttaatagaaccgttactatcgggtatttatgcaggggatattgatcaaatgagcttaatgtcaacattcccgcaaatgtatcagattgagcagaaacatcgcagtatttcactcggtatgcgtacgctcgctccgaaagaagagaaagctgaaccgaaaaagggaatgttccaaacagtgaaaacaggtttagaatctatcgtaaaatctctcgaagtaaagatgcatgaaggtacgataataaagggaactcgcattgaaaaagttgcaaaacagggtgatggttatacaattactcttagtaacggaaaagaaatagaagcggacgccatcgtagtggcaacttcgcataaagtattgccgtccatgtttgctcagtacaagcagtttcgtttcttccgtaatattccatccacatccgttgcaaatgtggcacttgctttccaaaagtctgcaatccagcgtgatattaatggtacaggatttgtcgtatcacgaaatagcgattacaccattacagcatgtacgtggacgcataaaaaatggccgcatacaacgccagaaggaaaaacactccttcgttgctacgtcgggcgtgctggtgatgaagcggttgtagaacaaactgaagaagaactcgttcagctcgtactagaagatttaaagaagacgatggacattacagaggatccagagtttacaattgtaagtcgctggaaagaagcgatgcctcaatatacagtaggccataacgagcgaatgaaacagctcacaacatttatggagaaagagttgccaggtatatacttggcaggtagctcctatgctggcgctggacttccagactgtattaatcaaggtgaggaagctgcaaagcgtgtattatctcatttggagaaagtaatagatgctgaattaatcgcacaataaattataagaaacgccttcaatcatattgaaggcgtttcgtttattatataaaatacttattcgccaataaacatatataagttatttggctttataacagcatctcctgcataaataacccactctgttaagttatcaaaatctaaatgataactatttccttcactcatatcttctataaaatatggttcattaatgagtattccttgaatgaaatcttccgtaatgttttgcatttcaaaccacatatgttcactttttccctcttcgtaggatacaccaaatttagcaaggaaacgaaaatcttcatttgattgttcaatgtgaaaaatgttgctgaaatacccgaaagtattcttcgcattgtaagccatacgatcagtttcactatttgttttatagaacatgagccctgtagcttcctcgtgttcttggaaaaagctttcaatatattcttctgaagtattaaatttgaataagagaacagatggagattgatggtattcatctcggtcatccataccgcctaagaatgtattttgtgcatctattggttgtagtttcacttcttcatcctcgattgaagataattggtccatactcgttttatgccctatataagataatcctttttcccacggaacagcgactgtatgtatagaaccttgctgactatgtgcgataacgataggctcatttatagggacttgtccattctcaacggcattattagcaaatgtttgaaagagatcgctaatgccgtagtaggaagaaatgcgatttggaataattaactctatttcagttacgcctgctcttaaaagaccgtgtgtatgaaaccaatattgcgtaggctcaccgtctttatcgtcttcataaatggaatgaataacgtataagtcaggaatgtcaggtaataattcattttcaacgtgatattcaatatagcttctagatatcactttcattgctgcacttgaatcgattacaaataacaaatctggggcgagattccataagaactgtaactgctggaaaaagcagtccagtacatcgcctacaaatagcgtacgagtgaaaatttcagtgccgaaagctgcatcttcaaaattacgatctacgattgtagcatcttgtctattgtacattttatatccttctggatcgttcggttcatcaatatgcagttcatacggtatgactgtttcacccatatgtaattcaacaataaggcttgtctcatcactataaacaatttttaaatcatcaactttagtagcgatcgtttctagtcgctgttttaactgctcaattgtaattctagttggtataacggcaatcatatctgaaaaatgacgttctaatgttccattcatagctgcgcggtatgtttctgtttgcacttccatccaatcactcctattcaaatgaatccattttacatgccaataaactttcgatattttctgttttctctctaacattatagagtgtatttgtagaaggtgtaaaattattattttgtattatagtttgaaagcttgtaaattaaataaatcttttgtaaaatttgtcgaaatatagttctatataacgaatcatttgttatgatagaaatgctgagaaaatatgaaatagagagaggaaaatggctgtgaagaaattgttaagtgtctttttatcattcttgctattgctttcatttactggaactttagcgcaagcagaagaaactgcttctatgtcagtagaaaaagcaattcaagtatttaagcagcaagggaaaacgaaggggatagtagaaggatatattgttggatatacgcaaagttcttctaaatatacgaaggatccagctaagtttgatgatacaaacgtagcaattgcagattcgccaaacgaaacgaatccagacaaaatcatgcccgttcagttaccgaaaggtgatgtgagaacggcagtgaatgtaaaagatcaccctgaaaatatcgggaagaaagttagtttgactgggacccttgaattatattttagtaacccaggtctaaaatcagtaacagcttataagtttcaaggtgaaggacaaaaccgtgttagcgatgtagtagcttcaccgaacggtggagaagttgctaaaggaacagcggtaacattaacgacgaatacagaaggcgcaacaatctactatacgttagatggctctaatcctactaataaaagcgttcgttataatggacaaattatagtcaatgaaaatagtgtagtgaaagcaatcgcagaaaaagaaggacttactccttcagcaatttcgacattttcatttattatcgtaaataatgaacaggttcgtattcatgacattcaagggaaatcacatatgtctccttacaacgggaagaaagtaaacaatgtggaaggcgttgtcacagcgcttgataaaaacggcttttatatagaagataatcagccagataatgacccagctacttcagaaggtatgtacgtatataaaaaagatgtgaatgtagcagtaggagatcttattcaagttgatggagtagtagaagaatatgttggaccaggatatgcagagcgatttgaaacagacttaacgacgactgaaattaaagcgagccgcgttgctgtaatcgcaaaagatcaatctttgccagcaccgattgtacttggggaaaacggtgtgaaaatcccggaccagattattgataatgatgcatttggtttatttgatccaaatgaagatgcaatcgacttctatgaaagtatagaaggtatgcgtgttacgatgccaacaccaaaaattattacacctcagaaaaacggaaatttatatgtaacagtaaaaaatggtggagataaaatagtaacacaatatggcacacctctattagatgaaaatcaattaaacccagagcgcctttctgtaaaagtacctcgcgattatgtagcaaaagtaggagatacttttactggagatataacaggggtagtaggatatgattacggttctttccgtatttcgccaataacagaactgccagctgtagtggatggtggatttaagcaagtaggggcaaatattcagccacgtcttgataagttaacggttgctacatataacattgaaaacttctcggcgaataaaaaagaaacaacagatgaaaaagtaaaagcgttagcgtattctattaaatacaatttaaaaatgccagatattatcggtgtagaggaaatgcaagataataacggatcaattaatgacggtacaacagatgcgtcattaagcgcaaaacgtatcattgatgcagttctagaaattcgtggaccgaagtatgagtatgtagaaatcgctccaaacaataatcaagatggaggagcaccaggagcgaatattcgcgtcggcttcttctataatccatcacgcgtgaaattagcgacggtaccgaagttacttgataagaatgttgttcgtattggagacgaaaatccattgtttgaaagtacacgtaaaccgctagcggtagaatttacgttccaaggacaaaacattgttgtcgttgcaaatcacttaaactcaaaactaggagatgcaacgccatttggaaaagtgcagccgctcgtattaaagagtgaagacaaacgaattcagttagcacaagaagtaaattatttcgtgcaaggaattcagaaaaagaatacaaatgcaccagttgttgtgttaggtgatatgaacgatttcgaattctctaaaccactaaaaacactagagggaacaatcttaaaagatatgttaaacacagtgccgaaagagaatcgttacacgtacattcacgaaggaaatgcacaagtgttagatcatattttagtaacaaacaacatcgcaccacacacaattgtagacccagtacacttaaactcaaacattatgaaagaacacggacgtgtaagtgaccacgacccagtacttgctcaaattgatttgaagaaggcttcttaaagtggggaacgcttaggtgactaagcgttctttttttgcatcgttatagaatagtataaagagatgattcctttttttgtaatctaacgataaaattgattgaatatttagtttttaataagggggacaacaatgcagttacaaataaatggaaaggtaatgaatcagtttgcaattttttttagtacgatcatcatgcttcagtttgtagctgatataacaggacttacaagcaatctagatattacgtataacttaatacatacagcagcttcttatataacatttagtttggcggttattttcactttaataggtgcaagaagagaattaagtaaatatgcaattgtttcattatgtttagttgtaggtattaaagcgatttattttgtagcggttgttattttatggggattggctggtacaccgtaagtgaatagtaaataaaaccctaatttccaatatagtaaggaaattagggttttattatacttgaaacgcttttctacaccgctctcttttttgcaaccttcttctatatttttttttatcacgttttactccttgtatatacatgattaagctaacgaggaggaagaatgcacattgtattgtcaaaatatacggcgacatgccatgcaaaggttgttttgggtcatataaatgaaaaggagctccgcctattgtagggaatatcgtatttagcaggacgtatggaatggaggcaactgcaaatgggaaaagaatcgccatatagtccttttgtgaccacgcagatgcagcaagtcctaaaagggccattaaacctgcaaataaaaaattaattccgatatatacagtaatgtaagtgaggggagattcgtaatataagtttgcaaacatcccattatcatttataatgcctgaaccagccgtcggttctccgtctggaatggttaatttgcaaaataataacgataagatgaacgggaatgtataaagaagtccgccacaaaagaatgtaacaatatatttcgttactgaataagggaacaaagaaatccctttacttacaaacggtttaaaaccatctgatttatccgaattgtaacttgtactaaaggggaaactggcaataacgggcattaataataaataaacatccatttcattgtcgcgaaatccaatccatttaaaagctgttgttacaaacgcatccgttccatccccaatgtaacgaattacataataataatggtaaataaaaataagagctagtccactaaacataataattaaagaaacacgattacaaaaagcttgctttatatttaaacgaagtgcacgcatcatgactgaaaaagcctccactgttttgataaacttgtctattttctatattactattaattgtaaagattttcttgtttttttatttgattatttgaaaaagaggaattttgttgttggtaagtaaggtttagctgaaattaatttttctaaaatatggttgacaattaagtattacatttgtaatcttaattatagattacaaatgtaatacttaggagtgaaatatactatgacaaatcaattacctaaaatatctgaagcagaattagaaattatgaaagtgctttggtcgaattctccgcaaacagcgaatgaaattatagaagaactggaagatgcaatggactggaaaccgaaaacaatccgcacattaattaatcgattagtgcaaaaggaagccgtttcttaccatcaagataaagggcgtatgtacgcttattacccgttagtatcacaagataattatttgcaagtggaaacgaaatctttactaaagcgtttttgcggtgcagcgtttaagccattacttgttaatttcttaaaagaggagaaattatcttcagaagatattaatgaattaaaacgcattttagatgagaagacagaggagaataagaggaaggatcgataaaaatgataaacacgcttataaatgtataccttcctcatttttttgattggcttatagaaacgtcacttatggctagcatattagtcggatttattttgtgtataaaagttctattcagaaataaattaaccccccggtggcaatatatgctgtggatcgtattaatgataagactccttttaccgtggtcgccagatagctcttatagcatttactcattactttcttatagttctagcgtatcggaagttattccaaaaaatatgccggctactgagaatatagtgaacatagaaagcgaccgaaaagtggaattggaatcaaattctaaaatggtgacaaaaactagcgaaccggaagtaaaagtcagttcggaaaaacagactacattttctttatacaaacttgctttgtatgtgtggctagctggggtaatcatattagcagccatcacgtttcttacaaatagacgtttatattcttacataaagaaacaaccggatattacggacgaacaggtcactacagtgtttaatcgctgtaagcagtctatgaaaatgaagaaggcagtttcattacgtcttgcaggaaagattgcaagtccaacggtttttagtttctttcgcccgaaagtattactatcaaaaaaacatatgaaagtattaaatgaacaacaattacaatatgtcttttaccatgagttagctcatattaagagaaacgatgtagctgtaaattggattatgtacagtttaatcctattaaattggttcaatccaattctttggtacgcctatttttgtatgcgagaagatcaagaattagcctgtgatgcatatgcacttacttttatagataaagaggaacaaattgcatacggtcatacaattattacccttttagaacactattcctatcaattaccaagcctggcaaatttaagtagaaataaacgaacactaaaaaggagaatcattatgattaaaaaattccaaaagaaatcgtatcgtctttctttacttggagttattgtcatagttgctatagcatccctttctttattcaacgcacgtgcaacggaagggaaagaaaaacaaaaggataaagtagagcagtcaaaggatgctttccaacatgctgtagatatgctgtttggtacagaagaaaatgcaaaaaaagaatataggtattcagcaagagtgtatgaaaataagacagattatttatatttagctgaaaaggctttaacaacagatgagttccaacagtacataaaattgtataaagaaattattaatatacagaaaaaaggtgctccgagagattctgactacgagtcaatattttttagggaagaacgtttaacagaaactgatcgtgaaaaattatatgcactttatgatcaatcaaaaccgtttaatgacaaagtggaagaatctttaaattacacggtaaaggaagcgcaggaacatgtagattttcaaattaagaagccaacttacacaattgaaggctacgatctaaaggatgaaaaggtaagttgttttattaagagaagacccgagttaattatagaattagagtatacaaacggaaaaggaaactatacaacttatcaatcacaagtatttggagaaagtaaagatccgttccatggtttatttgttgtagaagaaaatattgaacagtacgaattagaaggtaatcaaatattctatgcgactcataactcggataggaatttacaaggtatgaagatgattgttccagcaaaagggaaaaatcgtgcataccaaatcgttattattaatcatagtttagagaacccaggagaagcagtattcgataagaatgtaaataaagaagaattagagaaaattatgctttctatgttgaaatagcaaaaaggtgttcttaagatgtatatctctagaacatcttttccttttctcttttcttctgataaactatggaaagtatgatatacactgactgaaatttttttatactggaaataataaaaagagaacttgtatagaatgtaagcgtgtggtaatatcaaagatgtactgattgactatattatccaattggtcatttttggaggtgacaatgtggcgatagatcgaaaacgttctattattgaagctgcaacaaagtctttttcagcgttcggctataaagcaacaacgatggatcaagtagcgaagttagcgaatgtagggaaaggaacgatttatacttttttcaaaaataaagaagagttatttggtgaaattatttctaatttaattacagaaatgaagcaagttgcagaaagtgcaattcgttcagatgtttcattttttgaaaatgtacatagagcattatatagcatcttggaatttagaaaagaacatcagctcatgattaaattaattcaagaagagcgcgatatgggaacgaaagaagtacaagaagtgatgcaacaagttgatgtggaaatcgtttctgttattcaatcgtatttaaagattgcgattgaaaaaggtgaaattagcaaatgtgatccagaaattacagcatttattatgcttcgtctatatgtatcgcttatttttgattgggaaaaaaatcacgaaccgctagaaaaagaaaaaattgcagagttatttgaactttatttactaaaaggattgtcaaactaagataatccttttaattttataaaaaaatgaccaaatgaacaattcggtcatatatttaagttaaggggggatatagaaaaattataatcataataagaaaaaattgcatagtaataaattcagggataaggcatatgtatgaacaagtatagcctttttgtttgggtaaaaatgactatatgaacattttggtcattttataaaagggggagaaattatgaaagggaagcagttacttcggaaagagttcacggaaattataaaaagtaaaaaaatattaattccaattattgcggtcttattcgtaccaattttatatgcagggatgtttttgtgggctttttgggatccgtataaacagttagatgacttaccagttgcagtagtcaatttagataaaggcgcagtatttgatgggaaatcaattgaggtcggaaaagggctcgttgataatttaaaagataataaaagttttaaatgggagttcgtaagtgaaaaagaagcgaagaaaggaatggaagctagaaagtattacatgttagtgcgcattccagatgacttctcaagtaacgctacaacgttactaaaagacaatccaaagccattaaacttagagtacattccaaacgaaagcttaaacttcttatcttcacaaattggaggaacagccattgaaaagattaaaactgaagtatcaagcacgttaacgaaaacatatgcagagaaaatgtttgattccattcaagacgtctcaaaaggattagcagatggggcggaaggagcaaataaactacacgacggatcaagtgagctgcatgatggttcaagtaaagtgacggatggccttcatacacttcaagggaattctggggagatgaaggatggagttcagaaattagcagatggatctaataaattagtagatggatcaggcaaagtaacaaacggtttaaatgtgctaaatagtaaaacaggtgaaatgcaggtaggtatcggaaaattagtagatgggtcaggcaaagtaacaaatggtttaaatacgctaaatagcaaaacaggtgaaatgcagataggtatagggaaattagtagatgggtcaggcaaagtaacaaatggtttaaatacactaaatagcaaaacaggtgaaatgcagataggtatagggaaattagtagatgggtcaggcaaagtaacagatggtttacacgtattaaatagcaatgcaggtatcggaaaattagtagatggatcaggcaaagtaacagatggtttacatgcattaaatagcaatgcaggtattgggaaactagtagatggatcaggcaaagtaacagatggtttacatgcattaaatagcaatgcaggtattgggaagttagtagacggatcgggcaaagtaacagacggtttaaatacgttaaatagtaaaacgggtgagttgcgtgatggatctgagaaagtgaccggtggcttgaacaaattagtaagtaaatccggtgaattaaaaacaggaacaacggatctatcaaatggtatgggaaaacttgttgaagggcaaagccaattagaggaaggttctcaagcgatccaaaagggattgcaagagttaaatagtaacgtacaaaagtctgctgcaggcttagaggaaatgcagtcgaaagttccttctatattgaatacagtaaatgaaaaaatagatggagctggggcgaatgtaaatcagttaaatgaacttacacaatcaacagcaggagatgcaaaaaatgcagcacaagaggtagcgaatttacaaaagcaaattgaaagtttaccaaaagaatatcaagagcagttacagccattcgtaacaagtgctgtaaaaagtacagcgacagttcagcaaaaagctgccggagtagcaggtggaacaaataaattaaatgaagaagtgaaacaattaaaaggtgaaatacatcaaacaacaaatgggttgcaaaaaaacttaccaaatccagcagggataaaaactctagcaggtgctattgagaaactaacgagcgcacaaaatgaatttgttagtaagtttcatggatttggtgagggattagataatgcaaaaataggtgccgataaattaaaagatggatcagttcaattaattgatggagtaacgcaattgcaaagtggctctggaaaagtgacagcaggattaggtcaattatctgcaggagtaaatcaattagcagatgggtctggtcaagtaacaggcggtttaggaacattatctgtaggagtatccaaattagcagatgggtctggtcaagtaacaggcggtttagggacattatctgtaggtgtaacgaaattagcagatggctcaagccaagtaacaggtggtttaggaacattatctgcaggagtaaatcaattagcagatggctcgggtaaagtaacaggcggtttaggtgcattatctgcaggagcaaatcaaatggcagttggagtaaatcaattagcagatggctcaagtcaagtaacaggcggcctaggtcaattatctgcaggagcaaaccaaatggcaggtggagtaaatcaattagcagatggctcgagtaaagtaacaggcggtttagggacattatctgtaggagcaaatcaaatggcaggtggagtaaatcaattagcagacggatctggtcaagtaacaacgggcttaggtactctaaatggtggcctaaatcaaatgtcaaatggctcaacccagctaatcgacggcgtaaataaactagcagatggctcaggaaaagtaacagatggtctcgtaaaagtaaacgacggttcaggtgaacttgcagagaaacttggcgaaggggcagagaaaactggggaagtaaaaggaacggataaaacgtatgatatgtttgcaagtcctgtaaaagtgaagacagagaaaatggcggaagttcctaactacggaactggatttacgccgtatttcttatcactcggtttatttgttggggcattattattatctatcgtatacccattacgtgatacagtaggcgttccaaaatcaggatttagttggtttattagtaagttcggtgttttactatcagttggtattattcaagcgatagtagcagatgttatattactgttcggattgggtgtagaagtacaaagcattccatacttcatactctttagtatcattacaagtttagcatttatcgcattaattcaatgtttagtaacagcattcggtgatgcaggccgttttatcgccatcatcacattaattatgcagcttacaacgagtgccggaacattcccgctagaattgattccgaagtttttacaaccattcaatgcttggttaccgatgacatactctgtatcaggattgaaagcagtcgtatcgagtggagactttgacttcatgtggaaaaacataggaatactcatgatttttatcgttgtattatcatttggaacaatcgtttctttaactttgatgcacaaacgaaaatttaaaaatgtgcttgaaaatcaatcggttgaagcgtagataaaagcacctttttggtgctttttttattagttttgttttatcccgctttaatgatgggcagtaagaccccacctcaaaattcagcgaaagcaaagaagttaggtggggatcaactgcccattaaagcccgattggtgagggctaataatcagtgggggatgaagaaacccccactgattaaagtttcacttcattggttgagaaagttcatttgtttttctgtttttacggaacaagtatataacgatacttataagaataattgtagctacaatccaaataaatggaccatatttttcagcaaaagtatatagtttcatattactagcaatttcctcttttgtttttcctattagaatttcagaaccactatacccttcaagggtatcccccttttttatgccaaaaataagagtgtctgatttgttttctattcccgtatatcggtatcctttacttttaattgttaattgagtatcatccttttttagtgagtaatcttcgatggaaatatcttttcctgacagtgtaattggttccatcgaaaaacgaatttcttttaatgcaggaagaacctcattatttagtaagagctgctttgcaatatgttgctctgtatcaatgtttatccaatttgcttttcgtcgtttatacgtattaatttcaaggagtgcgaattctttattttgaagtttttcctctgtaataggttgcgcagtagttaatgctccttttaataaaatcacaccgtcttttgcagattgaaatgaagagacttctttcgtttcttttaatgtattgatagcacttctataatcttcttttcctaaaagaacagctcctgtatgtacggttaaaataagatatagaatgcttaatactataatagcttttttcactatgtaccctccaaagtatgtataagttaattgtaacataatttaccatttttaatttgttaatttgaataataggttgcaaatgtaaaagtggtaagtcagtttgaagaaagtgtgggtgagaggagtaaaaatgaaaaggaattccataataggaaaccagaagatacaaagaaaataggtagtagaatatatacgtctgtcgtagtagcttcattatcgaataagagaggaagcagtgttgaagcacctatggtgaaaaatagcaaaaaagataatgaataagaaaaatttatcaattttagagtgaaatatcatttataatcatccttctccttaatttcaccatatcgcatgtgcagtttaaacgaaagaaaaggatttacaacaatttacagagaaaactagaatagaggagttgatatgatgaaaggaaatcttacttattattttatcttaaatccgctaatcatctttcttgtttacgccctttcacctatcttatttcataaagaaaaatatataaatatgaaagatgcactaggaatacttgtagtttactatgtgcttattagtgggtattactttatggatgttgtaagtgaaagaatgaagaagaatagtaaggacaaacaataaagttttgttgtataaaaattaatggaggacaataaaatgactgaaagtgaaatgaaattccgggatacgaccattcgtaactttttcgataaagaggatcgtttaaaatcgattccaggtcaaaagaagaaaaaactagtattgttagagcatttaattagcaagttaaatgctgaaaatcaatatacagaaaaagaaatgaatacatttataaaacaatatcatgatgatttttgtacaattagacgtgaatttattgtacaggggtttatgaatagagaggataatatgtactgtataaacgggagggaagtttggacgaagtgggaggagttaaaataatgaatcagcgaggggatccccgctgattataagcctgtgctagtcttgctgtttctttgtagtaagtctatgaacgcttcaacattcgaacttgtaatgtatccaagcgttatatattcatcttcatagtaaaatattatttttttgtcaaagattcttctcttcgtttctatggatagaattttttcataatcaaattcggcaatgaatgtgtttttatattggctaaaaaagagaagtctttgattagtagcaagtaacatgccaggatacgggactttatgcgtaatcatatagccagtaagtgaacattttaaagtagataaaaccttttcttctttatgtaatagttgttttgcagctgttaagattggattcattgcatacattccttttattttgatgtatgaatattgtatcaagagtaaaaagattctcaatatgtaatattgcatattgggcgttttatagttgtaatattatttttcaaaagaaaaagtacgaggtgatttaatgatacggttagtaaaagagactgatgcagaagcaattatgaatattagaaaagaaattatattatcggaaactactacaaaatttttcatagtatccccaaagaagttaccgaatgatatgaatgcagaaagagaaaagatacggaaaagtaatgagaaaggtaatctttatatcgtgtatgaagtagatgggaaggtagttggctttttaattttcaaccgatatgaactagaacggttacaacacgcaggcacaatgggaatggggattaaagaggcgtattgtaatcaaggcatcggcacgaaattaattgaatttcttattagttgggcgaaagggcagaaaggtttagagaaaatttgtttaggtgtagtttctgttaatgatcgggcaattaaagtgtacaaacgtatgggctttgtagaagaaggcagacaacgaaagcaaataaagtatgaagatggatcatatggagatgacgtattgatggggttttatattgaataaaggatatatggtattaagaaaaggaatgtacataacgtaaatttctaaaagcagtatattgcccatgcattaacagacttttacctatgtataatattaatatagtaaaatcataacaaccgatattgcagtttccaataatatactatataatcaatttaagaaaacgttttcatgcaaagggggagaatttcgtgtcgactatagaggacgtggcgaaattagcggggttatcaaggacaacggtttctagggtgattaataatcatccatatgtttcagatgagaagaaaaaaagggttcaattagcaatgaagcatttaggcttcgttcctaattctgcggcgagaaggcttcgtaaacaaaaaacggaaacaattgcggtgctagttccaaggattacaaatcctttcttcagtagatttattgaagcaatcgagattgctgcttctgaacataaatataaactgattatttgtcaaacaagatatttaccggaaaaagagatggagtatttacaattattatctacgaaacaagtagatgggattattctatgttcactagaaaatccgtgggaagatgtagagccatacttacagcacggtccaatcgtgttgtgtaatgaatatattgaggaagcaaatattccaacagtgaagtttgatcatgcgcaaggagcatacatagctgcgaagcatgtgttagatcaaggatatcgtaatcttattttttgccgtggtaacgaaaccaaagtcgttagccagcagcgaaaaatgggctttttacgtgcaataactgagaagagccgccaagtagaagcgattgactttcttgaaaacgctttctcttgggaagatggaaaacgaatattccatgaagtattaaaggacaaaaaaaatcctaccgcgattttggcaggaggcgatgaggtagcagctggaattatctcagaggcgaaacgccataactggagcattccagatgatctcgctgttatcggttttgataatcaaatattatcgcagattacagaaccaggtattacgacaattgaacagccaattgatgaaatggcccgaaaagttgtcgacctgatgatggataaaatccatacgaaaaattatcgaaaaaaagaattgtatgagtttgaactggagctcttggtgaaaggttcaacgatgaaggataagatgttattagcctagtagactatgtctgctaggtttttttatgttcacaaactactattcttcgtgaacgcaatcgtcacatttgttatggtatgcttcgtgttgctcatcaatttctttcccgcagtgcgcacaagttttcgtcggtaaatttctgaaaaactccattggttgatcgatcatgtcaatccctccatttccatttcttactatcattgtattagtacaaaaaataaaagtcaacaactgttttataacaaaattgaaaattaatgaaaaagtttaggaaatggattatagttaacaatgtaggatgtaagtaaaacatgcatttctactcggttttagaaaggatggatacatatgaaaatgactgttgtcggcttttggggcggctttccagaagcgggagaagcaacgtcggggtatttgtttgaacacgatggttttcgtttacttgtagactgtggtagtggtgtactagcacagcttcaaaaatatataacaccatctcatatagatgcagttgtactgtcacactatcatcatgatcatgttgcggatatcggggtattgcaatatgcgagattaattatgagcggggcgaaggggcaactaccggaattaccaatatacggccatacctttgacgagaatggattccattctttaacgcatgaaccacatacgaaaggaatcgcgtacaatccagaagaaacacttcaagttggaccattctcgatttcgttcttaaaaactgttcatcctgttacatgctttgcgatgcgtattacagctggagatgatgctgtagtatacagcgctgattcaagttatattcctgaattcattccattcacgaaagatgctgatcttttcatttgtgagtgtaatatgtatgcacatcaagaggctgcaaaagcagggcatatgaatagtacagaagtagcaagtattgcaaaagatgcgaatgtaaaagaacttttattaacgcacttaccgcatacaggcaacccatctgatttagtaacagaagcaaaacaaattttcagtggccacattacgctagcgcatagtggctacgtatggaactcatgaggtgatacgatgttatttattgataataaaggaattacagatcctagaataaacttagcgattgaagaatattgtgtgaaaaatttagatattaacgaaacatatttactgttctacattaacgaaccttcgattatcattggtaaaaaccaaaacacagtagaagaaattaatgcagattacgtaaaagaaaaaggtattcatgtcgttcgtcgtctatcaggcggaggcgcagtatatcatgatttaggaaacttaaacttcagttttattacgaaagatgatggagacagtttcagcaacttcaaaaaatttacagaacctgtaacgaaagcgcttagtaaattaggcgtaaatgcagaactaagtggtcgtaacgacattttagctgaaggtagaaaaatttcaggtaacgcacagttcgcaacgaaaggtcgtatgttcagccacggtacgttactatttgactctgaaatcgatcacgtcgtatcagcgttaaaagtaaaaatggataagattcaatcaaaaggaattaagtcaatccgtagccgcgttgcgaacattacagagttcttaaacgaagaaatgacgacagaagagtttagacaacttcttctagaaacaattttcgaaggagaaacagaaatcccaacgtatgaattaacagaagaggattggaaagcaatccataaactttctgaagaacgttaccaaaattgggattggaactacggaaaatcaccgaagttcaacttacaacattcacaccgcttcccagttggacaagttgacgttcgtcttgaagtgaaaaagggaacagtaacagaatgtaaaatttacggcgacttcttcggttcactagatgttcatgatatcgaagagcgtctaacaggcgttcagttcgataaagatgcattcactgcagctttagaaggcgtagatatcgcacgctacttcggtaacattacaacagaagatttcttacatttattcttctaaaaatgagggaggcttccataacgggcagcctctttcttttttgcgtagattgtcaggttttgtcggtaagtcgatataactgaaaaatcgctgatataaattgagttgcgctgatatatttggaaaatcgccgatataaaccgagttgcgctgatatatttgaaaaatcgccgatataaatcgagcggcgctgatataactgaaaaatcgctcatataatttcatttaccacaaaacataaaatcacaggacatttgcccctcgtaaaggaatatatatattcaaaaggaggcgaatcgaaatgaaaagggtaatgtacgttgtattattactcagcttcgccgtcggaatgacagcgtgtaacagtggatcgccctcaagtcgtacaattttgtctatcggaaaaccggctgaggataatgttatatattttacgcatacagataacaaacgaaagatacatgatatacaagacatgtttcaaaataagaagtggaaaagaaatgaaacattcagcactgttaataaaacaccagatgtcatcttatcaatagatgaagacaatatagggttaccggcattatatgttacagtttattttcatgaagatggagcggacgctcttaacttgtttggaaagcatacgacgttacataaagaggaacttgataaacttagagaaaagatgagtgcatattatcctaaaatgatttttggtctagtgttataaattacttgtaaataaaatccccttatttttccaaagtaaactaagagaaggtgatctgtctatatgcagttaatagaatatcacttgccactttaattttcttttaatataattaatttagaatttttaaatattctaaattttataaaggtggggtttttgtgaatctcgttcaatctttggctgaaacggcaaaaaagaagggggaaaaaccggcttatatatttatggatcagtcggtctcatatgaccaattaaacaaaatggtcacaaggttttctagcaatttagcagaaatgggcattggaaaaggggacaatgtcgcattagttgttgggaactcaccacattttttggtcggtttatacggaacaatgaaagccggagcaactgttattccagttaatccaatttatacagcagacgaaatgcattatattttacaaaatggagatgtaaaaacaatcatcgtactcgacgtccttctacctgttatacaatctcttacaacaagacttccttcattagaaaacatcatcatatgcgaaacctcatcagattttaaccatacagaaaccgaaaaaatgaaaacgtttactagttttgtggggactggagatacaacttacgaaggtcctgaactagatgaagaagatgtagcggttattctatacacatcgggcacaactggaaaaccgaaaggcgctatgttaacacataaaaatttatatagtaatgcgaacgatgtggcgtcgtatttacaatatacggctgatgaccgcgttgttgcggcactgcctatgttccatgtattctgtttaacagttgcggtaaatgcaccgattgtgaacggggcaacgattttaatgttaccgaaatttagtccgaaagaagtattccgtatttgtcgcacgtacgaaccaacgatctttgctggcgtaccgacgatgtacaattatttatatttatttgaagaagcaagcgcagaagatgtgaagacgcttcgcctttgtatttccggtggtgcatcgatgcctgttgctcttctgcaaaactttgaaaaacgttttaacgttattgtttcagaaggatacggtttatcagaagcatcaccagttacttgtttcaatccgctagatcgtcctcggaaaccaggatcaattggcacaaatatttggcatgtagaaaataaaattgtaaatgaacttggggaagaagtacctgtcggcgcagtcggtgaattaattgttcgcggacctaacgttatgaaaggatactataatgcaccagaagatacagctgcgacattgaaagacggctggctatatacaggtgacttggcgaaaatggatgaagaaggttacttctatatcgtggatcgtaaaaaagatatcgtcttagttggcggttataacgtataccctcgtgaagtagaagaagtattatatacgcacgaatcagtagcggaagttgtcgtaatcggtgttcctgatgaaaacttaggagaagctgtgcgagcgtacgtcgttttgaagcaagcaaacgtaacagaagaagaactaatgcattactgtacgttacatttagcgaaatataaagtgccgaaaagcattgagtttttaatagaattgccgaagaatacgacgggtaagttgttaagaagagcattgagagagaaagcgatgcaagtgtaaaaatgaggcaaccatctttggaggtggttgcctcattttttttgtattgattaagctgtggtgccatatatttaaacctgtatatgaccaacaaggaggggacatacgtagaacagaagaaattaacgcttacgtcgggtgcaatatcttatttgttaaattatggatgaactctgaaagtgataagaacggtaattttaatcaaaatggagtagtggactgtgaatcaatggctacggtgttagtaaatgcatataaattagaatggaatgaaaatagtaagttaccaaaagaatttgctgatttgaaaaatcattgggctcaacgtatgccaatattttagtttaataagaaaattcaaattccaagttgacacatgcgaattacagaattaaaatgaaaagaaatcgaatagaatacattagaagctaatcagataaactgaaggcgcacaatgttcacatttgtgaatatattgtgtgcctttttctattgtataaactaagggggcttaacgatgaaaaagtggggtaagacagcgtttatgaaaagtacaggtgttttattatcagcagttgtacttttatcagggtgtggttcggcaacatccactagtaattctgaaggaagtggagataaaaaaacagttgagcttttaaatgtttcttatgatccaacgagggagttatatcaagatttcaataaagattttgcgaagtattggaaagagaagcacgggcaaacagtaaatgtaaaacaatcacacgggggatctggaagtcaagcgcgctctgttattgatggcttagaagcagacgttgttacactagcacttgcttatgatattgatgcgattagtaagaaaaaacaattagcagaagattggcagaagcgacttgcgaataattccactccatacacgtcaacaattgtatttcttgttcgaaaaggaaacccgaaaggtattaaagactgggatgatttaacgaaaaaaggtgtgtctgtcattacaccaaacccaaaaacatcaggcggggcacgttggaactatttagcggcgtggggatacgcactgaaaaaatataataatagtgaagataaggcgaaagagtttgttagccaaatttataaaaacgtagaagtattagattcaggagcgcgcggagcaacgacaacatttgttgaaaaaggaattggtgacgtattaatcgcatgggaaaatgaagcgttattatcccaaaaagagcttggaaaagataaatttgaaattgtaaccccttctattagtgtacttgcagaaccaccagtagcggttgtagataaagtcgttgataaaaaaggaacgaaaaaagtagcagaagggtatcttgaatatttgtactcagaaaaaggacaggaaattgcggcaaaaaacttttatcgtccacgtaatgaaaaagtagcagaaaaatatacatctcaatttccgaaagttcaattatttacagtagatgaactatttggtggctggaaaaaagcgcaggagaaacactttaatgacggcggcgtattcgataaaatttatcaaaaataatgcgtactgctaaagggggatgaggtgaaagaggatgaggaagaaacgtgttttaccagggtttggattatcgcttggatttacaatgttgtacatgagtttattcgtacttataccactttctatcgtatttattcaaacttcacagttaggttggaagaagttcgctggggttataacgaacgagcgtgtgttgcattcctatcaagttagttttacaacttcatttgcagctgctattgtaaatgccattttcggtttattaatagcatgggtgctcgtacgctacaaatttccaggaaaaagactattagatggactcattgatttaccgtttgcacttccgacagctgtagctggtattacacttacaacgctttatgcggaaaatggatggattgggaaaatatttagtctgtttcatataaaagtagcttttacaccactcggaattatcgttgcgcttacttttatcggtttaccatttgtcgttcgaatggtgcaaccagtgctgcaaaatattgataaagaagtagaagaggcagcttcgagtttaggtgcatcccgcttacaaatatttgtgaaaatcattttaccagaaatctttcccgctcttcttgccggtttttcactcgcatttgcaagagcattaggagaatacggatctgtcgttttcatcgcaggtaatatgccgatgaaaacagaaattgcaccactgatgattatgacgaaactagaacaatatgattacgcgggggcaacagctgtagcgaccgtgatgcttattatttccctccttttccttcttcttattaatatgattcaaagctggagtagaaggcatgaactaaaaagtgaataggaggagagaaaatggaaccaacattattagaaaagaaaatagtaaaaagcgtatcagctaaaaaagaatctaagcttgtaccaggcgtattaattacgattacagttttatttttatctctctttctattactgccactcataactatttttctaaaagcctttgaaagagggatggatgtatacattgccgctattacagatcaagaagcattttcagcaattagattaacgcttctcgttgcgttaatcgttgtgccgcttaatacgatatttggggtagcggccgcgtggcttattacaaagtttcagtttaaaggaaaacaagtattactctctcttattgaactgccgtttgctgtgtcaccagttatcgcaggattagtattcgtcttacttttcacaccgaggggtgctcttggcgaatggttacttgaacatggagtgaaactcattttctctgtaccaggcattattattgcaacaatctttgtaaccttcccgttcgttgcacgtgaattaattccgattatgcaggcgcaagggaaaagtgaagaagaggcagctttatcacttggcgcaagtggctggaaaatgttttggcgcgttacgcttccaaatatcaaatggggtcttttatacggcatgattctatgtaatgcccgtactatcggtgagtttggagccgtttctgtcgtatcaggtcacgtgcgtggcattacgaacacgatgccgctccatattgaaattttgtacaatgaatatcaattttcagcagcatttgcagtagcgacgttaatgtcattaattgcagtgtgtacactcattataaaaaactggattgaatggcgaatggaaaaacgccaataagagggggattacggtgagtattcaaattcaaggtgtatcaaagcaatatggtacatttcaagcactaacagacattcatttggatattccaaaaggtgaacttgttgccttattaggcccgtcaggttctgggaaaacgacgttattacgcattattgcaggattagaagaagcggatggaggctctgtttcatttgatggggaagatctaacagacattcacgtgaaaaacaggcaagtcggtttcgtctttcagcactatgcgctctttaaacatatgaatgtatttgagaatgtcgctttcggtttaaaagtaagaaagaaaagcttaagaccgtcagcagaagcgatagaagaaaaggtaacagaattattaaagctcgtaaaaatggatggctttgctaaacgttatccagcgcaattatctggtggacaacgtcaacgtattgcactagcccgggcacttgcagtcgaaccgaaaattttattacttgatgaaccgttcggtgcactcgatgcaaaggtgagaaaagaattacgaagatggctccgaaaattacatgacgaatttcaaattacgagcgtattcgtaacgcatgatcaagaagaagcgttagacgttgcagaccgcatcgttgtaatgaatgaaggctgcattgaacaaatgggaacaccggaagaagtatatgaaaatccagcaagtccgtttgtatatgactttttaggaaatgtaaatttatttcacggccgcgttcataaaggaaagctaaatgtaggatcggtcgaactagaagcaccagagcataagcacgtttcaaacgtagacggaatagcctatgtaaggccgcatgacttatcaatctctcgtacgaaacaaagtgtagatgcaatcccagcaaaagtatcttattctcacgcagtcggaaatatcgtatatgtagaattaaaacgagacgaaacagatgaatatttagaagcagaaattacgaaagaacagttcaaacagctgaacattcaagcgggtgatttcgtatacgtacagccgaaagaagtgaaagtgtttattccggaggattttgtaatttaagagtgtttactcttaaattacaaaatctattaataagaaaaggtctcctaaaagatattttaggagaccttttctttgtttatcgtaataactttttctcatatgaaatgtagtaggaagtttgtatatataatagcggagcgtgttcaaacaactatttgatatgagtagtaatgaagatattcttcctactttcttacataaaatttttaattttggatatttgtatcatatgtttctgcaacaaacacaaagtctacatgctctttatcaataaaaatacttgttttagatggaagacctgttatggtagaaacaatatcaacctcaacaaggtcaaatcctacacgataagcatctgcaatttcaattccaccagttagaaaatgcaatccatccccaaatgacttaaatacaaatacattttctttcaaacttttattatccatttcaatccattcttcgttaatataaatcttaaatgtcgtgcactttggaacacactcgatgtgatgtatccctttataactattaagcgaaaacatataggtatgagtttctttaaagttaatatctatcccgtatttaaaagcaaaggttttatataccatctcataaaacaatggcattacaatatcatcccatgcgtcataggcaaaagcatgaattggtattagatgaggatataaacttacaatcgctttttgaaaattaagtaagatggttgtatctgtaatttcttttaaagaatcatctatttcatggtcataatctttcgaaattctgttatcaatcatatgacaaactccttacatagtcttctatatactacgtttttccgcatcatcagtttgttccttctgcaactaaattgcaagtttaaccgatgattccaaaaaagcccttttcttattttatcaatcattaaatggggtgggatactacaagcattaatgagaaaagaaatcgtcttttctttttttatgatagatgtatttatttttaaactgcatttactttactctttatttcatttagatttgaatatgtaacattattgtgttgaaaaatatttcagcgaggtgagtttatgaaaggaaagaaatggtatagacaattagtcgtgatggtgtaggagtatcatctaaggccattttaaatgttgttaaaactggtaaaaaagttatacaaagtggcggtagaactaaatatactagtaaacaggctgtagtagttttaaataaaaaaggtaaagtaattacaacttttgctaaaggttcaaaatacataaggaaaggaaaaaataagtttgtttaaattaaataaagagatgcagattttattgaaacagacattagaatcacaaaataaacatttactatggttaaatgcttatgaagacttacgtatgatagaaactgaaaaaataaataaattgagagatattatagaagatgaattaatggagaaaggttttgatgaacgagacaatataaacgatttgggaagagcattagaagagctaattgatatcttaggaaatttaataccttagaaaatgttaagctgtatggcaacgtttttagcagatggaaagttccattaattacagaatgaaagattatataacttttaacaatgcgcttaatacgagtgtagctatgattagagggttttgtatgtgtaaaataacttcaaaaatataaggatatattttgagggtgtatgattatatagtatatttattgattcgaatctttaaaaggaggggaaacatggggaaaataatagggattattctgattataggtggtatgattccattaatttatgcaatgatgcaaatctatcgtcaatggaaagaaaaagggccttcttttgctcttaaatcaataattttcctagtcgtaagcattttgctagatactgcaacaactattatattgtgtatagtaacagtattcattggtatttgtttaattatctacacataataagttcaagaaggctaacttatcgattgttactaattggagggattggatgaacttcattttacatggatctaaatatacagttttagcttccgtttttgactcatttcaaggtagggaaaaagagtttaattggcttataacagacatggagaatgtcgcacatcaggaagagaaacttatccgagattatcctaaaatgtcgcatccaatagtttggatagcaggtgaagatctttcaaatctcgtaaagaaatataatcctcaatttatttggggtgtactatctgcgtttgataagtctataaacattgatattaataatttgcttgtagaaccctatgcaaatggaaatgaagggctctgggtaccaagtccaaatattcagcaccctcaagcaaaacttgaaattgtttgttgggattcgtatgtaacgcttttttttagtaaagatgaggacatcgatgataaatttcaagactatttcaagtccgctaaaaaattggatttttaaataggtcgtccttgagtaataaaatgaatgtatgaatagtaatctctttgatgattattggaatattagctagtatttttgaaaaagtaacttgtaaaacttcggagtgaattgttaacttttgatgcgataggaaatcgtaaataaatttatgaaggagaatttagagttgatagagttttttggatatttattaattttggttttaaatatgctagtagcatctatcgtatttttacaagagtactgcataggtagtataagactgtctcattataggagaatctttgctacggtcatggctatacgttcattggtgagtatatggatcatttaccctatgacagctactctgttagggacgctaaatattttagtgattcaatcaattatattacttttcctttgggggcttatgcagtgtgtaaagaagtacagaggaaagtggtatattacaatgattgcacttattatttatgctcttagctgttattttcatattatgtatgcgaaaactgtatagataatgagagggtatttgtagacctagttacatgatagtaagaatctttaatgaaaattataataaaatgatgtcaaaagggagactaaaagtgcttatagaatttttagaattcatttctatcttggctttagtagttgtattaacattaactgttatgttgcaagatatattttttataaatataaataaacaatatactgaaacacgtattggggcgattattttttgtattcggatgttgttcgggacatgggtagtatttgttacggaaactactataattgctgtctcaaaagtgactgcaattcaattaattattttacttcttttttgggcatgttcgaagtatgtacaaaaaactcgtgaaaattggctaattactatagttgcttttgttatttatggtgttggtacatacttgtatattcagtttgcttttagaggctattaatatatcaccagaaaagttagtggttagaaagatgcatttgttaaatgtgtatatgaaggaagagcgaatataggctcttttttctttatatataggataggacatgtatctaatcctcgtgggacaaatcaaaatagagagcggaaggaattatatgaacaaaaaagaattaaaattaaagctactgcaaggtctaggtgaagagttaaaagaagacggttataagactataactacacaacaagacctggtgaaaaaatttgataaaggaaaaatcggtatacatttagcctttatcaatcacctagaagattttgatgtgacggtggatgtgggaattcgttttgatgaattagaaaatatgaaaaatcaatgggctgacggtttaacaattagagagaaaaaggagacctatacaattggagttgatttagggaatttagtctatagagagcaaaaaaggtggcgtgttgaaaaggaagaagatattttacctgttactatggatattttaaaagaagttaaggaatacttcattccatatattgataagtatgtagatatggaaaatgtatttgatttatgtgtaagagatgatgatgaggctggattaatagggacaatatttgatgggacgcgagcacaaaatgctattggattagccttgttattaaataaagaagagatattagaacaaatcattgagaaaaagagagagtatttaaagacgagggataaatttgaattggagttatttgaaaactttctttctaatatgaatctaggataaacaaggttagttattcattttcgtgattatagtggggttaattgtttatatctggtttttctggttggaaaaacattaaactctagattttctattaatcataaatattggtaacccctagaaggaaacatttgacgtttttatgattagatacaaacttcgaatgtaacttataggggtttttatttacaggttttataatactggaaagcccatatcgaattttagccggtttgagatagtgcctgcgagtgatgatggtgcactgtaaccttgagcagtagcgatagacttagcctttggaagcaaaaaccccacagagtctagtcaacttacctttttaaaaagtgtatcaaagaattatttatttgagctcaattatattatgtgaaataggagtgagaatcttgttccaaacaataatttacgataaagctaaatatcattatgaaggagatttcccacaagaattaccgatggagcaagcatttgtacatactggaatgttcttaggttggattattgataataatttatttagtgatgaatttttagaagagactgaagaggaaattaataaatttaagcttagaaaaatgactggaactcaagtttatatgttctgggatggggttttaagcgatgacatgttaaatgatgaagggaatcaatttgcaatagattattttgattttgaaaaaggtttatatttagatgattatgatgatgtatttttagagtgtgatacattatatcaagtgcaagatacttgggaaaattactttaaattaaaagaagtgattgatattaggtatacagaatggaaaaaacttaaaaataacgggtaaagaggactttaagtaatggaatattttttgttccaaatgaaggtttattatatgctatagaaaaggggagaaataatgaaattcccaaaagatgaagatggacaagtattaaatatgttatacaagcaaggtatagattttaataaaaaacatatagtagatttctttattgcaattcctgatcaaggtaatggagaaaaaataattggcagactacaagagctgggcttaaattgtgaattagattataatgaagaatttgaagattggacgtgtacttgttctaaagaaatgttcttaatttatgaggatattgtagagatgcaaaaggaattgaataaactgggtgaagagtttggtggatatacagatggttggggtgcatttgtgtaatgttgaatttatttatcgtgataaaataaattagacgaagtaaagaaactatttacggaaagaagggcttatataagttcttctttctttgtatatattaagatatcttagtaatagaaacgtatatgatatgtgggcgggggctactggtaaaagcccaattggtaagggctaattaaagtttcactttatataggttttgagagagtaagatatattgtttgtagcggagatcttgaaggaagggagcgtgtgataattggcaatgacggatgaacaattcgaaaattatcttgttatgtgttatgacaaattagaaagtaaacagcaaaaattcatttcagattataatatctataactttgatgagtattggtatgatcaagatcaatgtatattacagtttaaaaaaaatggtcaagtattacttgaatttagtgttgtttttataggttcttggtctgaaaagagtaacagttggatgtggtcttgggctaatgagaatgtggctgattatgcaagaagtaagtctaactgtttgaaagatttacaaaagattacaggaagtgaggtttttataaatccactttttgaatgcgatcaagaaatggcgtatgagctagcagccttttccattgaatatttagatgcagaaggagtgtatatagcaccaggtgagagaagtgatgtatttatggctgttatgtcaccgtgtgcgttgtgagtagagcatattaaaaatatagataagatagaatgaaaaaggagtacagtttaataaattaataaaaggtatcataggtccccgatgcatggtgataaatttaaaggagtgaattatattgcttgaagtaaagttttacgattggaaaaaaaaacgtcctaaaaaacattatttgcttgtacatgaaattagaatttttgagctaattttctcaaagaaagttagcgagtttgagatgggattaagagagattgaaaaagtaactgtcttttgtttagctaacgaaaacactgatatttcatatgaagtgaatagagctttgggtgaaattcgtatatatgttccatatgattttatggactttttagcattaaattcagttgaagagaaatacaaagagttttgcaaattagtacgccaatatgttgtccctggacttgaagaaaactctactctttcatcatctgttgttaaagggtatatagaggaatctttagatgaaattgtgaagcaaaactatgaaggaatatttttagttgggaagacacctaagaaaagcccaagccgtaagaggatagcgatattaaaaggaattcatcgtgttaaaggtttccaactacgatgtgaagtgtatgatgaaaagggattaaagattcgagatcaactattggtggaagaagtaggaaatgaaatggtgtatgcaagatttttgggtaccttaaaatgggaaagtgaaaatctaatagtagttcaatctaaatccagtagttggaaagaagaaatctatctttaataacaaggttgtatagtagaaagagggttgtagagcataaatgaatttttttcgaaaaaataaattaagtgacattcagaaaaagtactatgaacattttggagagccgattcaatttgttaattattatagctgtggatcggttatgtattttcaaacggatgatacgctttattatgttaatttactgaatgtatgaggtgataaatgtgaatgaacgtttaaagaaaatagcaatgttaagagaaaaggtcgaggaaaaggctactagagaaaagtttttaatgttatgtccgtctataaaagaatttgagattattagcgggaagaaaattgcttcattagtaaactttttaattgatgaaacaccgaatcctattaaagttatgagtaaattaaatgctgaacaagttatcaatgaaataaaagaatttgaacgtgaattaactagtttattgtctaagaagattattctatggtatgcacatgaaaattgggactttggtgtgcaaatagagttggaagatttcatgttatatataaaagaagtattacatttcattggatatgatgatgctcaaagatcattaatttattctagccttattgtagtagatgcatctatgagaagtggctttacttttctaaagaatgagtatgatcttgaaatagtactatggaaagaaggctgaatgtattagagtgttttgaaacaaattggatgaatggttgggtttattattagaagaagtggtgcgtgttttagtgtgatagaaagaaaaagagagtcttcaagggatatgtataagagagtaaaggagagaaaatatgtctttttataaagaggaaataaaaggggataaattgattataagtgatgaaagcattgatattttaatggatgcttttcaagagattgaaaagatatataatgaagggcctcacagattaccaaatataaatgagttagagataatgttaaaaaatgcattagaaatgcagagtgatagtttttctttagaggaacaagaagtagtagattgtaagtttaaattaaaaaagcgtcgcaaaaaatcatttaagccagggatagtttttgcgataaatcttaaaaatattaataagtatgggtacggcatgttagtgaaaggccaaaatgttacgcggccatatgatggggaaacatatatagaatatttttctttatttacagatgaaaaaatacggataagcgagtttaaaaactattacaagaatcaaaaagaagtattatttacggcgtatactgcctggtctggttggttagatggtgattggaaaattattggtggattaccaatggaattgtttgatccgggggagtataatcttccagattttgtgtttgagaataaggatcaggggacttattttgtaagccgagggagagcagatggtcctttaatcgattttgaaatggttagtgaagaagaagggaagaaaattaaaaatccttcagggatagcaggacaatatgttatagaagattggttggaagagaaatatagcattttataaaaaagaatgtttttgtgttgaagagatcgaggattttacttgtatttgaaaggagtaataatatggatatttatgagttggctaatggtgtagattcaaaagaaaaattagtagaattcctgttttattttcaaaaagatttcaaagaaaataaagatgagtgggagaatataacattagaagattatttagaatcaatggaagcatggctaaatgattgtgatggtgcttttcaaaataaaggtgaagagatgcctaaaaatatatcatggaatttcatagcgacggtattactcgcaggatcttattatgagtaagtaaaaaacgaagagtctaaatagtcccttcgttttttcactttattttttctctactaatttcttattcttccaatctagtgtgaacaatttattaaatgttttttgatcaacgtcttttacgttgtttccaacccagtttgcagttccgaatgtgtagcctggacgaagttggtagtcgtcggcgtgttttgtataagcgacctgtaagttagattgatctgtatttttttcagagataacaacagcaatcataccaggagagaaaccactatttgttagcgctggaagttgatccatcggtattaaattaccttttgcatcagattcatataggtatgtgcgagagtacatgaaaagttggtttccatataaagaatgataggagtcacgtgtataaataccccagttttgattgttatatccgttaaagaatacgttccactttacgtttttgtttgtttggtcaattaaatttgttttataactagtttgtttatagcttacagagtcagaccaagtgacttgaccagttgcaccagcttcaccgctagggccattaggcgttacagaagctttaacagagccaccaagttgataagatacgctagatgttacagtcgtttcttctacagcatttgtaggcgctacgttaaagaaacgagcgctgttatcttgaaggttaaatgcaacatcatattgtgaaggataacgtaatgttgcactagcgccagggattgggtagttatcaataggtgcatcacttatagtaggatttgcttttagaaaactaccagttgtattaataacggcaatctgtttatcagcgctagggtcatcgataaaagttacctttaaagacattgtcatattatcagcttgatcattattaaatgtattatagctcgtatgtgtttttgcattttgcccgatatctgttacaacttgtgatgttgtttgagcgtaagcagcaggtgttgaaagagttatagcactactagcaaaaacagcggataatgctaaatattttaagtatgttttagaacgtttcatacaatcacttccttttatctttgtcgatatatgtcgtattacatttatatcgtaacatgaaaataaaacggaatggatggttatgcataattgcatagatgagttttgaaggataacgataatagcattttatcaatccttattaaggaaattgatgcggttttattttatcccgctatttgctgggcagtaagacccccacctcaaaatgcagcgaaagcaaagaagttaggtaggggatgaataaatccccactgattaaagtttcattttatatattcctcctaatcaattctccaacttgcgtcgcaacaaacgcaacatcactatcaatttcatccaacacgtaagactctaaaatgcccattacagctgttcctaaaaattttaagacgatatgtttatcgatgtttttatttactgatgtgtctgtatttaattttttctctatttcacccatgatgaaagttagtaattttttttgaaatgataaggtgctgttacttctaaatagtgccgcaaaaaatggtttgtgttctttgaagtattcaaaccatatgattgttccttctataaattctttgttttgcttctcgtagcatatttcttttaattggtctaaatgatcgtccacaattttatctaataaattgtacttatctagatagtgtaagtaaaacgtttttcttccgatgtttgctttttcggtaatgtttttaactgtaatttcatcaaatccatctgtaattaacatttctataaatgccgattgaatggcgttttgtgattttataattcttctatcgattttctccatatcgtgttcctccgttattgatacacatatttcgttacgtgtgtattatcacccaaatgcgtaaatgtggtcattgaaacaagtggttgctcgctttattataaatatacacgtgagtattaactctcacaagtgtaaattaaaaatgaagtaagggtggttttatatatggcagttacgaaaagaaatgtccgtttttatgcaagaggattacaagttgcaggtattttaaatattcctgtaggtgctgagggaaagaaacaaaatgcagcgattgtttgtgtgcatccaggtagtagctgtaaagatcaaacggcaggattatatgcagagaagttagcagaacaaggctatgtaacgcttgcgtttgatgcatcgtatcaaggtgaaagtgaaggtgcaccgagatatatggaagaaccagctgcgcgcgttgaagatattcgctcagcggtagattatttgactactctttcttatatagatgaagaacgtatcggtgtgttaggcgtttgtgcgggcggtggttatgcggtaaatgccgcaatgacagagcgccgcattaaagcagttggcacagttgttggtgcaaatattggccgattaaatcgtgaagctgatccaattggggtgttagaggcgattggtaaacaacgtactgctgaagcacgcggagcagaggaactgattacaaattggattcctaaaaatcaggaagagttagtagcagcgggtatgaccgatatagatattgtagaagcagttgagtattacacaacgccacgagggcaaagtgttaactctccaaataagctaaactttacgagcatgggatcggtaattggttttgatgcgttccatttagcagatacgttattaacgcagccgctgcaaattattgtcggcagtaagcaaggtgcatttggttcttataaagatggtcatgagctttatgagaaagcagcttcagagaaaaaagatttacttgttgtggaaggtgcgagtcattacgatttatacgaccaaccagaaccagtaaaaattgcagttgaaaaattaacaagtttttataaagagcatttgtaaaaacaatgttgatataaatggtgcctatagttgttagatacaagtctaacaactataggtttttactatgatgagcgaagtgcttaatatttacgttataagtgcataacaagttataataaaagaaatcaataaggaggctggctgtgaagaatcttcgttatctcaatatatttaccatgttaattatatacacactacttatgttttacattggctggaacggatgggtttggcttcatgcggtatttggctgggaatcttggggatattatgctttcatagttgcatttatttcatatgcgtacattctcgtgcaagtgtttaagtttttgccatttctgcgaacgataggttcgatttggtttgcagttatacaatatgcgcttatgttgttgccattagctaatattatggtctttcttttacagttttcagtagagaaagaagcggcaattatttggacaggggcggctgtgatagctgcatttatctttatctttgcgtatggagtatttaatgcgtatagtccggtagtaagaaagtacgaggtgcacataccgaaaaaggtagaggggcgtaaaagtttacgcattgcgatggcttctgatatgcatttcggtaaactgtctggcgtttcgcatttaaaaagacttgttcgtcatgtaaatgagatggaacctgatattattttactgccaggtgatattatcgatgatcatccaggtgtgttcattcaaaagaatatgggaccaatcatgaaacaaatgaaagcaccattaggcgtatatggtgttttagggaaccatgaatactacggtagagcggttccagagtttttacaagagatggataagattgatattcgtattcttttagatgaagtaattacaattgaagatgacttttatctcgttggaagaagagataaaacagagcgagatcgtcaaagctttgaacaattaatgagtacggtagataaatcgatgcctgttatcgcaatggatcaccagccatttgagttgaaacaagcagcagcggcaggtgtagatttattattatccggtcatacgcaccgcggacaaatggcgcccaatcatattgtaacgagaagaatgtacgagctagactggggatacgcacaaaaaggcgcgttccacgcaattgtttcttctggatttgggttttggggaccaccgcttagacttggtagtaggtcggagattgtgcaggtagaagttacatttgaataggggttatgaaatagagagctgatggctctctattttttttaataaaaacaaataacaataaatatttatgttggtgctaatttcataaaagagataagattataagactcgatcaaaataaagggggattgtaagtgatcatattagatgtactatacggagaatttgaagtggatcaagtagtagaagaattaatttcaagtaaatctatgcaaagactaaagggaattcatcaagcaggcgcaagttacttaatgaacgagaaatggaatgtaacgcgctttgatcattcagttggtgttatgttgttagtgaaaaaactaggtggttcagtagaagaacagatcgctagtttactgcatgacgtatcgcatactgctttttcccacgtgattgattacgtttttcataatgaagatgaaagttatcatgaagagatatttagttctgttgtgaaaaactcagaaattccagcgattcttgcgaagtatggttataactatgaagatattttgttagatgattcgaaatggacgttactcgaaaggtcagcaccagaattatgcgcagacagagtggattatacattacgagatatgtatacatatgggtatgtttctttagaagaagttcacagttttttagaagatgtcatcgctgtagatgggaaaatggttgttcaaagtgtcgaaatggcagaatggtttacagaaacgtattacaaggaagtaatcgatttctttatggaaccaatgaatatttacggaaatgatatgttagcgaaaacgttaaaggtagctcttcataaaaggattattcatgcagatgattttcttcttgaagatgaggagcttatttcgaaattgcagcaatgtaatgaccccgaagtagaagctttattaagcaaagttcatcgaaatgtaaaggtaaaagaagatagaaacgattatgatttacatcagaaaaataaagtgcgtcttattgatccgccgttacttcgtgaagggaaaatcgttcagtcgtctgttgtgtcagaaaacataagacagatgagtgatattgcttatgaaaaagcggtgagagggatgtatgtgaaagtgatttcgaattaaaaaagaagtagtgcatcgtttttagagcgctacttcttttttattaataatcaaaccaattccaaatctcaatatctccaagagtcgcataacgtacgtgcggggagttttgtaattttaataactctttcgatgggccagtaataacaattccgtatacttttacaccgttatcctttacatattgataacgtttatctaagtttagttctttctcagaaagcgctgctattttgcttactgtttttttatggatagaaaggacgcgcatcatttcggttactttgtcttcttgcgttttctgcccgtcagtttcattatcgaggaatcttacatattctggaaatcctatagcttctccgccatgtaggatatagtcatctacattttttctttcttgtcctgtatctaaagcgtaccatacaggagttggagggagtttttgtgcctcgaatatgctatataaaagcggttctaattcttttaaagtgtaagctttatcaaaagaaattgctacttctgcaacggttccatcatgtacttttgcaagtgtatcccatactttttttgatgaatcctttaaataatcaccctgctctgttttgggatgaacaaagaagagttttggttgatagaacggattcatccaagtttgcttcgtgatatctacagatgataagaagctttttgtttctattgtaccgaggggcatttcttttttaccgatggttcttactaaatcaaattggctattcgtacggaaaaaagcttctacacttgttccgcctcccataacgcggctatttggaatagttgcttcaagtgccagagaaggaacctctctaatttcttttagccttttatcattattagcttgaaaataaaaggctgataataccccgccgattatatagataacgatgcaaattgataatataaaaccaaacgtttgtaaacgatgtttccacttaattctccaaaaaggaattttaagatcttttggaggtaactttttcttaattggttctgtttttgttaacagctcatctaagtaagcttcacaagcttcacatgactcaatatgactttctaacagttcttgttcatcatgcgtgagcgttccattttcatacttcttccatagttttttaaattctgcacagcccatctgtatcactcctttatggtttttatttcttttcgtcccctgtgtaattcaattttcactttcgctaatgagagaccagtcatttctgctatttccttataggagaatccatagtaatctcgtagtagcagggcatttcgtctttcgagcggaagagaagataaactgtctaaccaactagcaatctcatgttttacgaaatattcatgttctgtacttggaacgtttggtaaatggaattctgcaacttctgttgttttatatttcttttctttacgataccaatcgataaaggcattgtaggcaattgtaaataaccacggcctaatttcttctcctttataatagtcaatatggacgagcattcggtaaaaggtttcttgcatgagatcttctgcatagtgggaatctccggttagggagagaagatagcgaaataaatcttgcatatgctcggagtaaatgtcttctaatgattgtttgcgtttcactacatttccctcccttcatacataacaacgaaatacatataaaaaagttacaattttttatggaattatagtaaaaaacgtcaagaattggataggattctcttttatcataatacatataaggcgggtgaacagagatggaaagctatgaaacacaaattcaaaggtcaattgattatattgaggaagatgtaatggaaaaacaaacgctgcgtaatttagcgcgggttgcaggtttttctgagtcgcattttcatcgtgtatttcaggcgttagtaggtgatacagtaatggagtatgttcgaaagaggaggttagcccgggcagcttatcaactttctcatacggatgaaaaagttattgatatcgcatttgagcatggctttcaatctcacgaaacgttcacgagagcctttaaaaaattatttcaaatgacaccgagtgaatatcgaaaacaagaaatcgaaacaccgatgtattacagagtgaatgtaaagcaaagaaaattaaatccgtatttaggaggcatacaaatggaatatcgtattgtaaataaaccagaatttttaatggcaggttatgaactgaagacgacaagtaaagaggggaagaaccatcaagacatcccagcattttggcaagaatatttacaaaaagatcttggaacaacgattccgaatcgtaaagatacgagccaatgggtagagcttggattatgtactgattttaatttagaaacaggggacttcacttatattattggaatggaagttacagactttgaaaatgtaccaaatgaaattgcaaagcgtactttccctgcagcaacatatgcagtatttacaacgccgaaagttcctcataaagaaatggtatcgtctattcaccaaacttggaatgcagtattctcagaatggtttccgcattcagggtatgaacattgcggagttacagagtttgaactgtacgatgagcgttgccacgaagataagagtgagtttgcacaagtagagctttggataccggtgaagaaaaaataataaggtaagagcgaatcattgggagatggttcgctttttcataaaaggagaaatgggaaaatgttcaaaaaactagaatgtgtatctatacatacgaaagatatagaaagatcagtttctttctataaagaaatgggaatgaagcaaaactggatgatagaaagagaactagaagaaggagctatttggacgttaataggattgaaatttccagatgagaaaagttcggagttagtaataagcaatcatccggatattaattttacggaagtcgaagtattagtagaagatgtacaacaaacgtatgagagtttaaaagataataaagatgtaaagtggattcgcgaaccatttccaacagaatcaggacatgttgcagtaatggaagcacctgatgagaatgtgtttgtgttagtagggaaatagctgaaatatggagtgacctttcatagtgagttatgaagggttatttttactttgtatagtagggaagtaggttagtattgtcggtttttgtcggtaagtcgatatatctagaaaatcgccgatataattcgagttgcgctgatatattcaaaaaatcgctgatataattcgagttgcgccgatatattcaaaaaatcgccgatataatttcatataccgctaaaacacctcaaaaaaaacgatctgcataatttcaattaccgcaaaactctcccagaaaagaaaaaaagacgccacatagcatctttcttacgaacgaaacggaaatacaaggataatcgtcgttccttttccgagtgcactatcaacggaaattgttccgttatgagcatgaacgagctgttttgtaatggctaggccaagtccagttccgatgttgctttcttctgtgtttgttccgcggtaatatcgttcaaatagaagttctttcgttttttcatccattccttttccgtcatctgaaatggagagtgtaaaggaattagcgttttgtgatagttttacgatgacattagtcgtttcattattatgttttaccgcgtttacgagtaagttttcgataatacgctgaaaccatttttcttcaatgaaatattgaattttatttgagctcggtacgaattcaatattttgattttgtagtgttggattgttaataaactgcaataatactttttgaacgaactgattgatttcaatgtttacgtgttgggcaggaaggctgttattttttaattgatacgttaagcttaaatcatcaattaatgtcgtcatatattgagatttctctttcataacactaccaaattgctgaatatcacgatcagtccagttatattgatccgattcgagtaataatgcgtagccatataatagagctaagtggtgtttttaagtcgtgtgttagaccggtaatccattcttctcgtgtttgctggaggacttgcctcatcgcatcattttttttgagtgtaatagaaaggtgttctagtgaacttgttacatctctaaacaaacggaatgaccatttttctttaccagatcgccggaacctgacaggttttccttttttactaataggttcttcatactttccgccagcgatatttttaagccagcgcatcgcatgtaataacggtttcccgaatttattaccgtaccaaatagaaagaatgactaaataaacaaatacgataagaaggattaatccgcatccgatgagaaacttcttagtaaatacatcttcaatttcgtcatctggatagtagtgatcatttttcgcagtcacaacgagaaggttgccactatttgcatcgtaaaagctagacgtattttctttatgattccacggctctttttcattaagggcgatttgtattgctgaaaatgtttttttctttccagttggataggaaaaaacctcttcgccattttgattaaatatttgaagtgctgctttttctttagacagtaactgtttttcttgatctgttaatgtgaacgaatccatcgttaaagaggagtgatccttttgaattgctgtcagtaacgcattgctttttaacataccaccataaataacaagtgctttcttttcttctaattcaatttcccaatatgtaaatttataattgctttcgatatgatgctgtatatatgcgactaaagatgtcttcgtataagcatccggaacatcatttggtgtattaaagtggtagaggatttttccgttttcatctacaacttggagccaatcatttttctcctttattaaatcttgcacttcagattgtaacgaaatatgcccatcttctgaagagatgtatcttgaaattgtaaaactatcagaatccggaatgttaggttcgtataaagtactagtaagaagaaaaattaaataagtaaaagcagcaactacagcgataagtaatgtaactaaaacaaaaacgtgttgcatgataaattgaataataagtcgtttattaaaattcatatcgtcaccctactttgtaacgaacttataaccaagcccgcgaacggtttttatatattctggtttacttggatcgtgttcaattttttcacgtagttttcgaatgtggaccataacagtgttgtcatcgccattataggcaggtgctccccaaactttttcatatatttcctctttcgaaaatacgtagttcggattctcgcaaaagaagagtagtagttgaaagagttgagcagaacattcgacaatgtgcccatctactgttagttctgcagagtgctgatcaatttcaaatcttccaaatgaaattgagtgtggtttttgttcgtgtggtacggtttgtttcatatgtctccgaagctgtgctttcatacgtgctactacttctaatggattaaatggtttcgtaatataatcatctgcaccgtatgaaaatccggatattttatctaaatcagatgcttttgctgataggaagaaaattggacaatctgtttgttggcgaatgattggacaaatatcaaaaccagattgtccaggaagcattacatctaaaataattaaatcgtaattgttttgcttagttagagataaagctatttcagctgatgttgcagttgtaatatgagaaaagccttctttttcaagaatggtagttagtaattgtaaaattgctgtttcatcatcaacgagtaaaatatttgcttggtacataaatatccctcctaattttctcgaatatcatatcatcattttgtaacttatggaatttttaaggaaattttaaggttttctttcgcaaaaaattaagaatcaaatgatatgataaaagtaacataggggaggagatgagtgtgaacccgtttcaagtgatgcgagctagatattttttaattgtatttgcactattaattttaatagcgagaagtagtggcgatttgctaacaagtatatttcatatacaaaattcttcttttataaatatccttatattctatatccttccgatggtatggatttcttatgagtatagaaagcaccacatttcattttcattatttgttaataaaaatgaaacatttaacttggtacaagttttatacattacggttatgttatgcatgtttagttacgggtatcttattttgtatatgtatagttttgcatggattacaccggactttattatgaacgccctgcatgaaccaattgtagatagtactgggggatatgtatctcaagtcattagggtcgtattcatcgcaccaattatcggggaaattgtttttcgcggatttttacttcaacgttttgcaacaaaatggggaacgagcatagcgaccatcgttgtagcaatattgtttgcgttgttacatgttgatttcctcggtgcagccatattcagcatcgtattgtcaatcgtatatattcgtacgaaaagtttactcatgccaattgcaatacatatgttaaacaatgcatttgtaataggtgcgtcttttctaataagtagagaaaaaattattagttttgccgatttctcaaattatacgacattctttcctggacttattatttttataacaggattaaacttagtacttatctttttatttgttaatcgcaaatattggagtaaagaagtgccggttatatatgcagagcaggaaaagagcttttcagatgtagtcgggagtaaataagatgaagaagacggttgaaaaaatattaaaagacattatagattctacgtctattacagatatgtgtgatagaagtgtttgtcattggcttcaacctgtagtagatacgattgtgtttccagagtattacgtattttctagtactcatttaaaagaaaatattatttctcttcttattgtgttcggggttttactaacatttggtctaattgtagaagaaatgatgaagcgcatcttcaaaaagaatgaagagaagtatatgtggattcataaagtattcgagaaagtaatggtggctttccttttgttttatggtataaaaacaatcatttactttatagctttgaaacatcattaattcgaaatttgaaagggatgtataaaattatatgaatgaaacgatatcatcaaataagtttttttatttgattttacttagtctagtgttaataacgacagtgaatgttattttgcgctgggaggaagcttattttttcatgtatttagcgctccatttgctagggattttatgtataagtggtggagtggttactgaaaaaaagaatgaagaaagcgttaactatatgtgtgtgatcggtctggttttacttttagctgtacagggtattatgaaatatagttctttctctttacaagattttagtttattaatagatgtacttccttaaagaggctttttattttatctaaaaagcaagtagggtacgtgttggtttgtaagtgtacggattgtgaaccgaagaaagtgtttaaagataggtaaaactcttcttatgtagaagagtttttttatgtaaataaaaagatccagagcaattcacataataagcttgttctaatttagcgtgtacgaacttacaataataatagacaggcagcatagaggagggaatagcgtgaagaaggttatcggttggtcgctttttttgtacgttggatttgcgttacttatatattggtatttatttggatggaatcatgaacttattccggacatgtataagggaacgagtgcagatccagaaacgtttatgagtacgagagagcttacgctaagccaagattattcgcgcgtgaaaaatttactatactttttagcgacgcctcttgaatggattattttattatttgtacttgtgctaggtatttcaagaaagtttgagaaatggtcgaaggaaacgactaaaataagtgttttgcaagttgcgatttatttcttttatttatcattattgacaacagtgcttgccttaccgatgcaatggattggccggaaagtgtccgttgattacggcatttcaacacaaagtacacaaagctggataaaagatcatgttatcggtttttgggaaagttatgcgactatgttaatcgtagttaccgttctattatggcttatccgtaaatttccgaagagatggtggctcgcaggatgggcgctctctgttccatttacaatctttttaacattcatacagcctgtcgttattgatccactgtataacgacttctcgacgctgaaaaataaagaattagaaacgaaaattttagcgatagcagacaaagcggacattcctgctaaacacgtatatgaagtaaatatgtcagaaaaaacgaatgcattaaatgcttacgtaacaggaattggccctaacgcccgtattgtaatgtgggatacaacacttaagcagttaaaagataaagagattttatttataatggcccatgaaatggggcattatgttatgaaacatatatattttggcgttgcaagttatgtattgctatcgtttataggtatgtttttaattagtcgtattataaatatgtgtattcgcaaatggggagatacattgcaaatttcaaaagtagcatgtttctccattttacctttatttttcttaatttcttctgtcctctcttttgcagcacaaccagcaacaaactacgtttcacgtatagaagaaagagcggcagatcaatatgctttaaatatgacgaaggatgggaaatctggtgtgaaaacttttcaatatttatcaaaaacaagtttaagccaagtaaatccgcctgcgttagtaaaatttttcttatacacgcacccaccaatttttgaaagaattcatacgtttgaacaatatgagaaacaaagcaaaaaggagtagcatgatagctacttctttttttatagagatataagtttcatattgggaatatttatcattgctttttattacgattttgtaaataataagctataaaattctaaaaatctatatataaaggaataaaggtggaaaaatgtattttttacaaaatttaaaagtgaaatataaattattagcgcttatttcattagcagttttaggtatggtaattatgagcagtgtagcaattaattctattaataagattaagcacgatacagaggttgtagtagatgattatcaatattctgcaattttattagaaggaatgcttcgtacacaaaattcattagaatataacttactagaattaattacggcatcacaaaatgaagtggcaaataaagaggggataattgataatattgaaaaggatcttaaaaaatatgattctttattaaaagaatatgatgatggttttaatttaagtaagcaagaggatgaactatttcagaagatgaagaaatctttgccaagttataaagatacatataaaaaattatttgaaaaggcgaaggcaacaaatgagccacaaatggtaaatgaatttcagaaggaattaaaaccgaagggaatagagttagctggttatgcagtggatctagaatcgtatgtttcaaatttagctgaccaagtatttaaagattctcaaaaaatgattgatcgttccgttattacctttatcattcttgtagtagttactacaatcgttatatgtatagtaagttatattattagcaagctcatagttgctcctttacaaacggttagtcgtatgatggaaagagcgaaagaaggagatttaaccgtacatggtgagtatactgctaaggatgaattaggtatattagtaagtaattttaacgagatgattgcagggctaagaacaaatatgcaagaagtagagaataatattcagcttttattccaacatgcagacggagtagtatctgcatcagaagtatctagtagtgcagcgaagaaaatcactatggatattgaagaagttgcaaatggtgcagagagtcaaatgcaagcaatggaacaaactgcgggtgcgatggaagagttgacgcaaggaatgcagagtatagtcaatacatcatcctctgtaaatgaattatctgctcaatcagcattagatgcagagagtggtaacaaattaatgaaacaaatgattcaacagatggatacaatccaaaattcggtacatagcggtgtgaaacaagtagagactatgaaagaacaatcagaagaaattgttaaaatcattgatgttatgcaaggtattacctcccagattaacttattagcattaaacgccgcaattgaggctgcacgtgctggtgaaagtggtagaggatttgcaattgtggcagatgaagtgcggaaattagcagaacaatctagtgattctgcaaaacaaattgagaatcttattactcaagttatgggaacaacgaaccatacggtacatatgatggggaaagtagataatgaggtacaggcaggtacacaagtagtaatgcatacagaaaaagtatttggaacaattacagaaaaagtacagcaagtatctgagcaaattcaaacggtatctatgtctacagatgaaattgcagcgagtagtgaggaaatctcggcttctgcagaagacatggctcaaatttcccaaagatcatctgaccgaactgatagggtaaaagagtctattcaacagcaagaaaaatctgttcaagagatttcggtttcaattgaacatatgcataacgcagcaggaaaattaaaacaaatagttgcccaatttactcttcaaaagtagtagcatatttgagtgttaataaatataaaaaaatcatcctcttttaagaaaaaaggatgatttttttatcccgttatttgctgggcagtaagacccccacctcaaaattcagcgaaagcgagttatcagtgaagggggatgctacctctgaaatataaaccatgaatatagtaatctccattaggcatctcctttaggtgccaataaagggaagttataaagtgaaaaggagtttataaagagattgtagaatgttttagtatataacaccttagatgtgacaacttcctttttgaaaaagaaagaagggggtataaagcagaaaggtagtgggaatatttcttctagaagatttgcattttatcttacattcacaaaaaaaatagtactcctgaaacaatgaagttcattttatttgaatgaaatagggagagaggataatgaagaaaaaaatattgggtgtaatgatgattgcgacaatggcaggaggtatatttgcaggggcgaatgtgacacctgtaaaagcggaagagtatccacaaatgattgtgtttgaagatgttccatacggattttgggcatatgatgctattatggatttagcgtatcataaaattatattagggtatggaaacgggaagtatggtgttggcgatcttataacacgtgagcaagtagctgggactatttacagaacacttgagataaaagaagaagggccagtagcgaatccatataaagatgtttctgatagtacaaccacttttaaaaaggaaattttagcgttaacaaaacgtggtgtttttacaggggatggccaaggggattttaggccgaaagcaccaatctctagagcggaaatggctgtcattttaaaacgagcatttaattttgaaacgaaacaaaaacatacatttaaagatattccaaaaggtcactgggcagaagatgcaattagtgcgttacaatctaataatgttgtgagaggaactgggaatggcatgtatgaattaaatcgccctgtacctagagaacaatatgctcagtttattaataatgcgattattaattatcatttgaaagaggattggaagtagagtgaaatatgaaagcacaaatagaaaaatttgtgcttttttgtttgtttaaaaaagaattattattcgtatttatgtatttttatgattataaacaagctttataatcaacccgatgaaaaagacatgatgtgtaatatgattcacaaaaccgtcacgaaatgtgtcggaaaatatattgtcactataccatttattctgtatatttttaaaaaaacatatacatattggggagataatttgatgagcaaaaaattattaaaaacagctacagcattaacaattatgggtggggtgttattctcagcagagagtaatagtgtaaaagcggaaagtgcaccgttgcaaaaagcaaatacaattgtatttaaagatgtaccaaaaggacattgggcatatgaggcaattcatgaattagcggaacaagaaataattttgggatatggcgatggaatattcggttttggggataatgtaacacgtgagcaagttgcagctttaatttaccgtgtgtttgatatggaagaacaagatgaatatgaaaacccatatggagatatcgatgaaaattcaacaagctttatcgaggagatattggctctaacggaaatcggaattttccagggagacgagaatggaaactttagaccgaaggcgacgttaacgcgtgcggaaatggcacaagttcttacgaatgcttttgacctacaggcaaagcgatctcataactttaatgatgtttcagcaaattcatgggcaacgaatgcaattagtgcagtacaaacaaatggtattacaatgggaatcggagaaggtaaattcggtccgtctatgaaggtaacgagagaacaatacgcacagtttttacatagagcaatattgcatgatatggaacaagggcagtaataaagtttaactagtcaaagtgaaattcaaaaataatacaaaaaggtcgttgttgtataacagcggccttttttgtatgaaataaagcgcgaaagaatggcgttttgaaaaaaacgaaatgaattttcaaaaaaaacttccttttctgaagatttgttatataatataaaacatgaaatcaaatctgttataaaacagtttaagaaggggatgctaatatgtcgacgcaaacttcacgggttacactcgttggagaaatgttaccagcgtacagcgaaatattgacacctgaggtgcttagttttttgaaggaactacatgagaattttaatgagcgccgcatagaacttttacaaaaacgtgtagaaaaacaaaagagaattgatgcaggggagtttccgaagtttctagaagaaacaaaacacatacgtgaagcggattggacaattgccaagctgccaaaagacttagaggatcgccgtgtagagattactggaccggtagatagaaagatggtcattaacgctttaaattcaggagcgcatctttttatggcggattttgaagattcgaattcaccaacttgggaaaatgcagtggaaggccaaatcaatttacgagatgcagtaaagggaacgatttcacatgaaaatgataaagggaaagaatatagattaaatgagaaaacagctgtactcattgtacgtccaagaggatggcatttagaggaaaagcatatgcaagttgatgggaaaaatatgtcgggtagcttagtagacttcggcttgtactttttccataatgcgaaagctcttttagcaaaagggagcggcccatacttttacttaccgaaaatggaaagttatttagaagcgagattatggaatgatgtattcgtatttgctcaaaaatatatcggcattccaaatggaacgattaaagcaactgtgttactggaaacgattcacgcttcgtttgaaatggatgaaattttgtatgagctaaaagatcattctgctggcttaaactgcggaagatgggattatatttttagctttttaaagagtttccgtaatcataataaattcttactaccagatagagcacaagtcacgatgacggcgccatttatgcgttcgtattctttgaaagtaattcaaacatgtcaccgccgtaatgcaccagcaattggaggaatggcggcacaaattccgattaaaaataatccagaagcaaatgaagcagcttttgaaaaagtgcgtgctgataaggaacgcgaagctttagacggtcatgacgggacttgggttgcccaccctggacttgtaccggttgcaatggaagtgtttaatcacattatgaaaacaccaaatcaaatttttagaagacgtgaagaaatatgtgtaacagaaaacgatttactagaggtaccggtgggaacgattacagaagagggccttcgcatgaatattagcgtaggtattcaatatattgcatcttggttaagcggacggggagcagcacccatttataacttaatggaagatgcggcaacagctgaaatttcaagagcacaagtatggcaatggattcgtcatgaaggtggaaaactaaatgatggtcgtaatattacgcttgaattaatggaagaattaaaagaagaagaattagcaaaaatagaaagagagattggtaaggaagcctttaagaaagggagattccaagaggcgacaacgttgtttacaaatctcgttcgaaatgatgaattcgtaccatttttaacattaccgggttatgaaattttataaaaaatgaaaaggggatggaacaaatgaaaaacgaaagaatcgagaagttacaagaaagctgggaattagatgagcgttggaaagggatcacacgtccatattcggcagaagatgtaattcgcctgcgcgggtcaattgatattgaacatacgttagcgcgtcgtggtgctgagaagctttggacatcgcttcatacagaagactatattaacgcacttggcgcattaacaggaaaccaagcgatgcaacaagtaaaagctgggttaaaagcgatttacttaagtggttggcaagtagcagctgatgcaaacctttctgggcatatgtatccagaccaaagtttatatccagcgaacagcgtacctgctgtagtaaaacgaattaatcaaacgcttcaacgtgcggatcaaattcagcatatggaaggaagcgatgatacagactatttcgtaccgattgtagcagatgcagaagctggatttggtgggcaattaaatgtattcgaactgatgaaaggtatgattgaagcaggtgcatcaggtgtgcattttgaagatcaattatcttcagagaaaaaatgtggccatttaggcggaaaagtattactaccaacgcaaacagcagtacgcaatttaatttctgcacgccttgcagcagatgtaatgggagtgccgacaattatcgttgcaagaacagatgcggatgcagctgatttaattacgagcgatattgatcctgttgataaagcatttattacaggagaaagaacaccagaaggattttaccgtacaaatgcaggtcttgatcaagcaattgcgcgcggtttagcgtatgcaccgtacgcagacctcgtttggtgtgaaacgtcagaaccgaatttagaagatgcaaaacgatttgcggacgcaattcataaggagcatccagggaagctacttgcatataactgctcaccttcatttaactggaaacaaaaactagatgaaaaaacaattgcaagcttccaaaaggaaatcgcatcttacggttacaagttccaattcgtaacacttgctggattccattcattaaattacggtatgtttgaactagcacgtggctataaagagcgcggcatggcagcatactctgaactacaacaagcagaattcgcagctgaaaaacatggctactctgcaacacgtcatcaacgcgaagtaggaacaggttactttgatgaagtggcacaagtgattacaggcggaacttcatcaacgacagcgttaaaaggatctacggaagaagcacagtttatgaaataaaaggaaggggcacctttttgaaaggtgccccttgttattttctaaacgattcgaaaagagagattgagttgtcggcaaaaaacgatactaacttttctttattactaaatcaactccactcagccctatgatcacgaataaacttcatatctttctcataatgctctagatgtccttcatcgatcattctttggaaattcaagtcgccttcttgagcttttcgtttcatatatgtacataacccttctaatcgaagcaacaccattcctaagtaatcttcatccatatttttatcataggactgaacgaacaaattcactctctctttaatacgatctgcatgttgcgatgagtcataatgaacggcttcaccggattcagtataatacactctacttaaaggcacacaagtatagagtgtataagcgatatcccatagtcttggaccaggagcagcaacatcgaaatcaataatccctactggcttcttattattaaaaataatgttatatatggtaaaatcattgtgacataaaacctcaatgttatttggagtatgatccatcggtttccaatcagctaataacggaaaatcacttacagcatcatggtaaaggcggagcatctttgctatttcttttaatacatcattagatcgcatatattcttttaaaggataattgccagcttctccttcaataaaggataaaatctctctatccttttcatctacacctaaaaactttggagcataatgaaatcctttgttttctaaatattgcaatagcttatgaatcttttcactgcctggctttaactctcgccgaacagtattttcagaacgatatacgcttgagacgtttccccctgttagcctttcttctttagcgtagtttgacatgtgaaaattccccctgtgattaaaaaatccaattccaaatagtgaatagaccaacaacggcagaaaagaggagggaagcaagcaatgctagacagccaaaaggaactagcttatctttccatgtttctttatactcataaattaactcctctgctactttcttctgcactgaagataaaggttgatctttatacaacccttttatatggttagaatcgcctttaaactttaaagcacgtgcaatatgatgaggactatttcccattgatttttcaaataataaacatgattcatgcataatacctgttttatgctcttctagataccagtaacgtccagccatttctggatattgtaatttataataaatatctccgagttgttttcgaagatgtaattcatttgggtatgtaaagatgaggccatgcaatctatctcttgcttttccaagattattattttcaatatcctcttcaattctttttaatgtttttctaggaattttattggtcataaactcctccttatttagaatagagataattatattttataagaaatactaaaaattagaaattctattttcgaaaaagattgtacattttattttaatgtgctatgatgatgtcagttgaatagttaaattaagcaatccatatgttatcaagtgctgaaaacgaacgagaaaaagtatgtgagaactagtttatgtttcgtatttgataatgtgtggattctttttttagacaggaagactaaaaaatttaaaatttgtattttcttaggaggaaataattatggcagtaacaggacaagtaaaatggtttaacaacgaaaaaggtttcggtttcatcgaagttccaggcgaaaacgacgtattcgtacacttctcagcaatcgaaactgacggtttcaaatctttagaagaaggtcaaaaagttagcttcgaaatcgaagacggtaaccgtggacctcaagctaaaaacgtaatcaaactataattttatagttgatgatggaaaaaaggatggctaatgccatcctttttttgttgtggagaaagtttttttagagcctgtttttatatctaaatctctttttcgatgttacaactggtaaaaaattatctggaatgcgtattagtttctgtagaagaattagttcagcaagagcatttgctgcgtatgatagtaaataactataaatttgtattctctgttgaaatggagaaatcttttccagatagaccttgagtaacatcttttttgttagcgttgttgttggaattttgtacgttttgagatgatgtttctaacagttgttcttgttccttactaggggtattcagagcatctgagggaatgctattaacctgctgatttaatggattttctttatccatagtatacaactcctttttagaattcgataaaaagcaatgtaattataaatagctacttatatatattttgtttttgaatgacattatatacaaaacttatattgcaaagttaactaattaacgaattgttagtgatggataaagatgtacaaattttaattttttaataaaaattaaaagcgggtaacaagtacaaatactctttctcatgttttatataaggattatattacaaatcaaaaaagatgtagagaaccttggaagaaaatatagtcgttttttagggggaagaagaataaataaaatgatactacaaatgtaaaaaggcattccataaaggaaggccttttattgttcttgccctgattttttcttctcacgttttttacattctggacattttgatttacgaaacggtttggcaaagaatagcagaatgaaaaataaaccgaatataatactagctgagtttttcacgataatgacgctactatttttcatttgaatcgatggttgaatctctttttcttccatagtggccctccatatattggatttacattttaattatagcaaagttagttgttgtaatgatgtgaaatgaggaatggataataaatatttataggtagtataaatgctgtttttataactttaaaattaattaatttctatattgtgattttattgtttaacaaatgtttgataaatgataaaaaattgtaaaaaagcggaacttgtaagctatttccttttcatagatgctaaaattatatatgcagctgctaatataaatggaaaaaaggagataatggagtatggaaagtaaagtggaacgctatgtcgaaaattatgttgtaacgaaaaatacgatggccttacttcctgttattctaagtgaaaagaaaattgttacgcgagtcgttgaaatgaatgattcttttttcgtatttcaaaaacctctagatattatagaaagaagttgccgcaagcatggctctagtttcttaggcagaaaagaaggaacgaaagagttaactcatattacacataaagcaccgattgcgattagtccagcagatcaactttattttttccctacctattcttactctagaaaagagtgcgcttggttgtctcatttttatattgaaagtaataaagaattagaagatggaaatcttattattagatttataaatggctttgctgtgaaattagaaatatcaaaaactagttttgaaaatcaacaaaatcgtacagcgaaattacgtactgaatatgaagatcgtaggaaaaaacaagggaatccttgttttaaagaggtcgataaaaaagaggaatcaacattaagacccgcttatgagaaggtgtattttgtgaaggaaggcgaagtgtgaaaggatgggggaatccccattcttttttgtttgtcagtcagtctttgtagataaggcgatatattagaaaaaacgagttgtaattgatatatttagaaaatcaccagtataatttcatttaccgataaaaaccgaaaaacaatctaaataacaaaatgaacgacacgtcctgtcgaatattgatagattatcatagctaaataatgaaggaattcttatgaaagatatggaaactttaataaatacatctccgtatgtcgtatctaccatttcctctttcatataagcaatgatacagtagggatagtatttagagtaaaggggtaaagtgtagaatggattttcagacaatcaaagagtatttttcaccagaaaatatggatcatattgttgagagttataaagcgttcggaccacttcttggtattggtttaccgatgatagaggcgttgattccagcattaccgcttattgtatttgtactggcgaatgctgttgcatttggcttttggctcggttttctttattcatggcttggatcagtaatgggtgcattacttgtctttttcatcatccgccattttggtcgcagtcgtttcttttcgtttgtaaataagcatgagagagtacgaaaagcaatggggtgggttgaaaggaaaggattcgcaccgatttttgttatattttgttttccgtttacaccgtcagcgctcataaatgttgtcgctggtttatcccgaattagtgtaaaacagtttggtctagcgttagcattcggaaaacttgtgatgatttttattttaacgtatatcggtcatgatttaatgtcatttattcataatccagtgaaatcagttattgtagcgattggtatttttattttatggtatgtcggtaagaaaatcgaagtaaagttagaactacattaagaatagtcttctttgtaaaggaaagcttcagtattaaaggataaggggagaagcagatgaagaaaactttgaaaaaagaaggcatagagtggatacgaacaattttaattggtgtattattagctgtattttttcgaacgtttttcttttcaacgtatgttgtagaggggaagtcaatgatgccgacattgcaagatggcaatatgctagttgtaaataaggtgagttatcaagttggggacttgaacagatttgacgttgtggtatttcatgcgaataaaaaagaggactatgtaaagcgggttatcggtttacctggagatcatattgaatataagcaggataagttatatataaacggtcaatttattgatgagccgtatttagagaagtataagaaagagataaatggaaggcaactaacaggcgactttacattagaagagttaacgaaagaaaagctggtgccacccgggtttatttttgtagtaggtgataaccggctcgggagctgggatagtagacactttggctttgtaaaagctgatacagttgtcggtaaagttgatttgcgatattggccaattcaagaggtgcaaacgaatttttcaaaaggttgatataatgaagtagaagtatagaaaagacaaacaactcagtttgtcttttttcgtgtactataatacaattatagtagcaaactaacgttcgttatgtaagtgaaaggtggggttacatgtcacttcgatttgtgattggtagagcgggaagtggaaaaagtacactttgtttacgcgaagtgcaagaagagttaaaacaacgcccgagagggaaaacaatattatatcttgtgccagaacagatgacattccagacgcagcaggcgttaattggaagtgaggatgtaagaggttctattcgggcacaagtttttagtttttcacgattagcgtggaaggtactacaagaagttggcggagcgagtcgtcttcatattgatgaagcgggtgtacatatgttactccgtaaaattgtagagtctcgtaaagatggattatcggtgttccaaaaagcagcggagcaaaacggtttctttgaacatcttggcagtatgattgcagagtttaaacgttacaatgtaacgccatctaacgtatatgaaatgtggcaacaattggatgcgcatagtagcagtgccgaacaaaagttactagcgaataaagtgtatgatttacagctattatacgatgattttgaacgtgctttaattggaaaatatttagattcagaagactacctacaattgctagtggaaaagcttccgcagtctgaatatgtaaatggtgcggaaatttatatagatggatttcattcattttccccgcaagagttagagattgtaagacagcttatgatttgcggagcgagagttacgatcacgttaacgatagatgaaaaaacgttagcacagccagtaaatgaactcgatttattttatgaaacgacgttaacgtatgaaaaaatcaaacaagtagcgcgtgaagagaaaatagaaattgaaaaaacaattccacttatggaacagccgcgttttcattctccggcattagcgcatttagaagctcattatgaagcgcgtccgaatgaaaaatttaacggtgaagcgagtgtaacgattagtacagctgcgaatttacgagcagaggtagaaggtgttgcgcgtgaaattcgtaaacttgtggcggaggaaaactatcgttaccgagatattgcggttcttcttcgtaatggggaaagttattacgatgtgatgcgaacgttatttacagattataatatcccacacttcatcgatgaaaagcgcccgatgtcacaccacccattagtagaatgtattcgttctgcactcgagattattagtgggaattggcgttatgatgcggtgttccgctgcgtgaaaacagagcttttatatccattagacgtaagaaaagaaacgatgcgtgaagaaatggatgaatttgaaaattactgtttagcgtacggtgtacaaggaaagaggtggacttcagaggatccatggatgtatcgccgttatcgttctcttgatgatacgaacgggatgatcacagatagtgaacgtgaaatggaagagaaaataaatcgattgcgtgacgttgtaagaacacctgttattcgcatgcaaaaaaggttaaagcgtgcaggaacagttatgcaaatgtgtgaagcagtttacttatttctagaagagctggatgttccgaaaaaactagaagaattacgtatacgtgcagaagaaagtggagatttcttatttgcgacagatcatgaacaagtatgggaagaagtaatgagccttcttgatacgtttgtagagatgcttggtgaagagaaaatgtctctttctatgtttacggacgttatgtcgacaggtcttgaggcacttcaatttgctaacattccgccgtcattagaccaagtgttaattgctaatattgatcactccaggttatctgacgtgaaagcaacgtttattataggtgtaaatgagggtgttattccagcagcacctatggacgaaggtatgctttctgatgaagaaagagaagttcttggtgcagcagggattgaattagcgccaacgacgagacaaactttgttagaagaacagttcgttatgtatcaaatggtaacgagagcatctgagaagttatatatttcatgcccgcttgcagatgaagaaggaaagacgttacttgcgtctagctttattaagaaaataaaaagaatgttccctaatgtgaaagattcatttattaccaatgacgtaaacgatttatcacgttcagaacaaatttcatacgtagcaacgccagaagtaacgttatcttacgttatgcagcaactacaaacgtggaagcgatacggatttgaagggaatttagacttttggtgggacgtatataatttctacgtaacttcagatgaatggaaacaaaaaagtagccgcgtcttatcaagtttattctatcgaaatcgtgcgaagaaactaagtacagcagtaagtagagatttatacggagatataattaaaggaagcgtctctcgtatggaactatttaaccgttgtgcatacgctcattttgcgcagcacggtttatcgcttagagagcgtgatattttcaagcttgatgcgccggacatcggcgaattattccatgcggcattaaagaaaattgcggacaagctattgcgtgaaaaccgtacttgggcggatttatccataaaagagtgtgagcatctttctgttttagtaatagaagaaatcgcaccgttattacaacgacaaattttattaagttcaaaccgtcatttctatttaaaacaaaaactacaacaaatcattttccgtacgtcaatcattcttcgtgaacatgcgaagtcaagcggattcgtaccagttgatttagaagtgccgttcggtatgggtggtacaggatcacttccgccgatggaattctcattaccaaatggtgtgaagatggaagttgtcggccgtattgaccgtgttgataaggcagaagatgaaaacgggacgttcttacgtattattgattataaatcaagttcaaaagcgttagatttaacggaagtgtattacggattagcacttcaaatgttaacgtatttagatgttgttacttcgaatgcgcagacgtggatgaaaaaaggtcacgcagcatcaccagctggtgtattgtatttccatattcataacccaatcgttgagatgaaaggtgacgcatctgaagctgaaattgaaaaagaaattttaaagaaatttaaaatgaaaggactcgtattaggagatgctgacgttgttcgtttaatggataacaaactttcaacaggaagttcagatattatttctgctggcctgaaaaaagacggtagctttagtgcgcgttcaagtattgcaagtgagcaagagtttaacgtactgcaaaaatatgtacaccatacgtttgaaaatatcggaaaagatattacagaaggtgttatcgatattgctccttataaaatgggaaataaagcagcatgtacgttctgtaacttcaaatctgtttgtcaatttgatgagtcacttgaagataatcagttccgatcgttaaaagatatgaaagatagcgaagcgatggagaaaataagagaggaggttggcggagaatgatagaaaattggcctgaaaaaccagaaggtagtcaatggacagatgaccagtggaaagctgttgtagcgaatggacgtgatattttagttgcggctgcagctgggtcagggaaaacagcagtattagttgaacgtattattaaaaagattattaatgaagagaatccagtcgatgtcgaccgcctgctcgttgtaacatttacgaatgcagcggcgcaagagatgaaaaaccgaatcggggaagcgttagaaaaggtattaattgatgaaccaggctctcaacacgtaagaaagcagctgagcctattaaataaagcttccatttcaacaattcactcattctgtttacaagtaattagaggatattactacatgcttgatgttgatcctcgtttccgtattgcgaatcaaacagaaaatgaattgttaaaagaagaagtgctagatgacatattagaagaagagtacggaatcgaagataatacaatcttctttgaacttgttgatcgttatacgagtgaccgtagtgatgatgacttacaacgtatgattttagcgcttcatacagagtcaagagcgcatccaaatccggaaaaatggcttgataaattagtagaagcatatgacgtagaaggaaagacaattgaagatttagtatatgcttcttatttattagaagatgtgaaattccagcttgaaacagcggaacagcatattcgtaaggcaactgaactcgcaatgcttcctgacggtccagcgcctcgcattgaaaccctgcaagcagatgtagctttacttggaacgctatcatcagctgctcaggagtcgtggacaagtttgtatgaagcgatgcaaaacgtatcgtggcaaacgttaaagcgtattaagaaaagtgattacaatgaagatgttgtaaaacaagtagactctcttcgtaataaagcgaaagatgaagtgaagaaattacaagaagagttatttagccgaaaacctgaaagtttcttacgagattttcaagatatgcacccagtattagaaaagcttgttcaacttgtaaaagtatttacagagcgtttccaagcgatgaagcgagataaaggaatggtcgatttcacagatttagagcatttctgtttacaaattttaagtgaacaaagtgaaaatggtgaaatgaatccgtcagcagtggcgctccaatatcgtaataaatttgctgaagtattagtcgatgaatatcaagatacgaactttgtacaggaatctattattaaattcgtaacgaaagattctgagagtgaaggaaacttgttcatggttggtgacgtaaagcagtcgatttatcgtttccgactagccgaaccaggactattcctaggaaaatataaacgcttcacacaagaaggattgggcggtggaatgaagatcgacttagcgaaaaacttccgtagtcgtcatgaagtgttagcaggtacgaactttatcttcaaacaaattatgggtgaagaagtcggagaaatcgactacgatgcagacgctgaattaaagttaggtgctacctatccagaaggtgaagatgtagcggcagaactactgtgcattcagcaaacggaagaagaagtaatagacggagaagaaggtgcagaagtcgaaaaagcacagcttgaagctcgtcttatggcgcagcgcattaaagcgatggttgattcaggttatgaagtgtatgaccgtaaaaatgatagtatgcgcccagtacaataccgcgacttcgttattttacttcgctccatgccgtgggccccgcaaattatggaagagttaaaattacaaggaattccagtgtacgctgaccttgcgactggttactttgaagcgacggaagtaaatattatgatgaacgtattccgcgttattgataatccgatgcaagatattccgcttgcagctgtacttcgttctccaatcgttggattgagcgatgaagaacttgcaacgcttcgtgctcatggaaagaaaggctcgttttatgaagtaatgagctcattcttaaaaggggcaccacttgaagaggagcaagaacttcatgataaattagagtggttttataacttactgcaaggatggcgtgaatttgcacgtcaacaatcactttctgatttaatttggaaagtgtacggtgagacaggttattacgacttcgttggcggtttaccagctggaaagcaaaggcaggcaaacttacgcgtactatatgaccgcgcaagacaatacgaagcaacatcatttagaggattattccgcttcttacgttttattgaacgtattttagaacgcggtgatgacatgggtacggcgagggccctcggtgaacaagaagacgttgttcgcattatgacgattcataaaagtaaagggttagagttcccggttgtatttgtagctgggctcggtcgtcgttttaatacacaagacttaatgaaacgtttcttattgcataaagatttcggtttcggttcgcaatttatcgatccgcgtaaacgaattaaatatacaacattatcacagcttgcgattaagcgtaaaatgaaaatggaattaattgcggaagaaatgcgcgtactatacgtagcgttgacgcgcgcgaaagagaagttaattttaatcggaacagttaaggatgcaaataaggaaatggaaaaatggcttgatgcgagggaacatagtgaatggttattaccagatcacatacgtgccggggcgtcttgttatttagactggattgccccttcattatatagacaccgtgatagtgaaatgcttcttgaattaggacaaggaagtattccagatgaaatttacgggtatgacactagctggaaagtagaagttgtggacggtaatacgctacttgcaccagagccagttcaagaagagaaacaagaattgttagaagcgcttcgtgagaaaaaggctgtgccgttagaaagtgaacgaaaagatgaagtgtacgacagattaatgtggaagtacggatatgaggaagcaacatctcaccgtgcgaagcaatctgttacagaaataaagagaaattatcaatcagaagatggtagtgataacgcctttattaaaaaactacgtgcaccaattaaaacacgtccgcgctttatggagaaaaaagggttaacgtacgcagagcgcggaacagcagtccatgccgttatgcagcatgttgatttgaagaagccgattacggttgaagttcttcaagagcaaattgctggaatggtaaataaggaattattaacattcgagcaggcggaagaaatagcgattgaaaaagtaatttcattctttgacagtgacttaggtaaaagggtattagcggcgaaaagtgttgagcgtgaagttccatttacgatgatgcttgcagcagaagaagcatatcaagattggcaagggaatagcggggaatcgattcttgtccaaggggttatcgactgcatgattgaagaggaagatggcattacgttaatcgacttcaaaacagatacgattgaagggaaatttccaggcggatttgaacaagcgaaaccaattttagaagatcgatataaagtgcagctttcgttatatgcaaaagcactggagaaaagcttacaacatcctgtaaaagagaaatgtttatacttctttgatgggaatcacgttgtaaatattgaagaatagaggggcttgaaaatggtaacggaaaaaacgttaagaacttgtgaacagggacacgagtactataaaagtagcgattgtccaacttgcccagtctgtgagaaagagagaaaaccaaaagaaggttttctctctcttctttcagcgccagcaagaagggcattagaacaccatggaattcaaactgtagaagaactctcaaaatatagtgaaaaagaaatattaaaactgcatggtatgggacctgcgtctttgccgaagcttaggagggctttggaggagagcgggttatcatttaaataaaatgaaatagtgcctcttcactacttacttgtttataccactatttgtggacagtaaagctcttgcttattaaaattttattttaataattttgaattagataaaagaaaaaagtaggagaatatctcctactttttttacgctgttccaatctgatcttgatctgccacatcagaatcaaatgtattcgttgcactaacaccgttaaacgtattcacgacaaacccaacattggaagctccagatccgttataggctttcgtgttttctttcggagatacgttataaaaatctcctaagttgaaagagccgttactgttttgcacgacgagatttcctacaaccgaaggcataccatccacctactttactaagctttttaattactatatgaattattgtgcggaaggttcatccgtaatatattggcggatttgtataatacgagagttattaaaaccataatcaacatttccaatttgaaagcaaccagaatttaaaagtgtgcgtaattcaacgttattaacttcaataaaagggcattcatttacaatgtttaattttacatctgtcgttcgttttggaattgtaatgtgttcatctgtaaagatttcaaaagcatcaaagcgaccttctccccgtatataaaaaggaatttcacggtggacggcaatagctctactttttaattccatttggtttgcatctccaacttgaaatacagcagcaatccctaaagaaataatagaaacattttggacaatagacacatgatgcaacataatttctcagtctccttaacctggagtaggagggacatctgttactaatggtacaaatggaccctctgtaactgtttcaaatggtgtatcgagaatagaagatagaatgaggagatttgcatctccaattaaaaagagtgcggacgacgatacaccgttcattttaatctgtccgacttttaactcacggtttacaacgttaaggttcatacatacttactcctttcggaaatttcccggtatgtgctgaataaaggagagaaaggctttgtcaatatcttgtttcattgcctgaataatgatatctcgtaaataatctggatctgttgaaataccttcatatgattgcacttgtgataaataataagggagtcgatgctccatctgtttttttatgtcatccaccatcatttgtcgatacatttcatcaagcggtgttcgctcttcttgttcaaaatggagaatacgattatatgcttcttcatctaagtatcgatgcatttcttggaggataccttgataaaagtctgggtttgtttcagtttcagggtttaccttcaatgtttctgtatccacttgaaaatcttcaatttgttgtccttttgctgaaaatgggtttaaaccaatatttaaagtaccatttaaattttcgacttttaattgatcgaatttgtattccacttttcctacagaagaggaggggcgattttttaattcgttaagctcttcttggagttggcgcacttgatcttctaaattcaggatggctgcttgttgtgtttgaagagcttgttgaagttggtgtaagtaagtatatatatcttgattcatttgtgaaacctccttttcaatagggagggtaaaaatattcctgctatatatttatgacaaggatgtcttaagaagaactagttgatggtttgatagaaataatttgtcctttcgcctgtaatgggcgaagcggctccgtaaatccgcccgtatttgaaaatttagatagggctttaatacttccggcagtaccaatttggaacacagaagaggttgtaatgctatcaattttaatactgttgatgatgatactttggtttacataaaaattcaatgcaattgcctcctttaagttgagccaattatcgcttgatcgattacatctgaatcgttgacagtcgttgcactttgataattgtagacagaaacattgtctccaacgttgaaagagccggccccggcgaaagcacgtgagtaactaataggcctaatcgcaaatacatctccaatatgaaaaataccacttgatccaatattgacgatacgaatatgtccgaccatagctggcatataaaacacccttcgtttttaaaattttcttttctactattgtatgggcgttttcaataaaatgtgtgtttttttgaaataaaagacacacacacgctattgcgtgtgtgtgtcgagtgtttgatttgggtgaaaatccgtatgtacatgccaaattacatttaagagcctgtccagttcttggctacaatccactgttttttgagaagtcattccatagcgttcagcaaaataaatcattttttcacgttttttttcaatcgcttgctcaaacattgaaatcggctccatctctaaatgaaatttttagtatatatgtagtacatattatacaaaaactccataaaaaagaaataccttcgctaaaaaaagtaaaatttctacattttatgccaaatataaaggcgtaacgaatagggtatgagaagaatattgtaaaaattagcgtgtatgagaaggtttttttcttacggatgcgaatacaattaaagggcatgagttttaggatggagagtggaaatattgcgttttgtaacggcgaagaaagaagaaaaggtatttgtaggtattgtggatgaagaagaaaaaaaggtattacacttaagagaagcgcaaagacaaaaaggggaaaaggttacaatccctattacaatgttagagtgtattgaaagaggaactgaatgctttgagaaagtatgtgaaattgtaaattgggcaaaagagaacggggaagcggcgtattatccgttaacagaggtgaaaatattagcaccgattccaaggccaagaaagaatattttgtgcgttggaaaaaactatcgtgagcatgccatagaaatgggcggaatagagtctattccagaaaatataatgatttttacgaaagcaccaacaacagttattggcataaatgagcaaattaatggtcaccctcatgcaacggacgaactagattacgaaggagaattagctatcattattggtaagcgagggaagcaaataaaaaaagaaaaagcgcttgagcatgtttttggttatacgattataaatgatgtaacagctcgagacattcaaagaaaacataaacagtttttccttgggaaaagcttcgatacattttgtccgatgggaccgtatttaattcataaatcggtggttaatgcgccgaatgcattacacattgaaacggtagtaaatggagaagtaaggcaaacttccaacacaaataaaatgattttttcaatagaagaaattatttcaacgataagtaaaggaatgactttagaaccaggcgatattatcgcaacaggaaccccggctggtgtcggaaaaggtttcacaccaccgaagtttttacatgctggtgatgaagtggttattacagtagaaggaattggtactttgcgaaatgtagtgaagtgaagaaaagagctatcttgttaaaagatagctcttttttatggccttgggttatagaggtaatcaataacggaaaaagtgtaaagaccaatgaatgcaagtgtacaaatgccaaatagtataaccgtaagtgcgcttttttctcgtccaaaaccaatgatagtaagaataacagcagtccaaaatgatgctttcagtagtgtgaatgtagtaggagttgagtagtgagtaagccatgttgtggaaagtaggaagccaaagaatgtaactaaaataaaagatgtagctaaatagttaatatgtttaccatatcttaatagcatatcgcacctcctttacgattttaaaatacagaaaattacaaaattatcttaatgtaaatgaatataaaaagaaagaggttgtcccaacatgtcggacaacctctctatcattacgataatacagctttaattttttggaatgcccactctaaatcttcttcagagattactagaggtggtgcgatacgaattacgttttcatgtgtttctttacatagtagaccagctgcttttagttgttcacagtaaggacgagctggttcgtttaattcgataccgatgaataaacctttaccgcgaacttcagtgatcattgggttatcaatctcttttaattgcccaactaatttttcacctaattgaagagaacgctctgttaatttttcttcttctaacacttcaagagctgcgatagaaacagcacatgcaagtgggttaccaccgaatgtagaaccgtgagaacctggctcgaatacgcctaaaatgtcgcggtttgctgctacgcaagagattgggaatacgccgccgccaagtgctttaccaagtatgtacatgtcaggagttacattgtcccagtcacaagcaaatactttaccagtacggcctaagccagtttggatttcatctgctacaaataaaacgttttcttttttacatacttcaaaagcttcttttaagtaaccagctggtgggatgttaattcctgcttcaccttgaattggctctaaaatgaatgctgctgtgtttggtgtaattgcggcttttaatgcttctaaatcaccgtaaggaattacaacgatgccaggaagcattggaccgaatccacgcttgtactcttcgtttgaagacatagaaacagaacccattgtacgtccgtggaagttatcttcacaaacgatgatttcagcgcggtttgcttctactttcttcacatcgtaagcccagcgacgaactgttttaattgcagtttcaacagcttcagcacctgtattcattggaagtaccatttctttattagttagtttcgcaactttttcgtaccaaggacctaattgatcgctatggaaagcacgagaagttaacgtaacacgattagcttggtcaattaaagcgttaataattttcgggtgacgatgaccttggtttactgcagaatatgcacttaataagtccatatagcggtttccttcaggatcttctacccaaacaccttctgctttagaaataacgattggaagtgggtgatagttatttgctccgtatgtgtctgtaagttcgataatatccttagtttgaatcatgattgttcccccttttgttattacaagaagtttgtaaatactctaaatattatagcatttaaatgtaaaaaagcgaaacatttcctgaaaataaatgaacatgttatcatatagagtgaaaaagtgtgaaaagaggaggtaagggatacgatggtacatatgcatattacagcatgggcgttaggtttaattttattcttcgttgcgtattcactttattcagcaggaagaaaaggtaagggtgtacatatggggcttcgcctaatgtatatcatcattattgtgacaggcttcatgttgtacatgagtattgtgaagacagcaacaggtagcatgcacatgtggtatggcttgaaaatgttagctggtattttagttatcggcggaatggaaatggttcttgtaaaaatgagcaaaaacaaaccaacaggggcggtttggggcttatttattgttgcgctagtagcagtattatacttaggactgaaattgccacttggctggtacgtattcaaataaaaataaaaccaccttataatctcaaagacttgggagataaggtggttttttattttatgtcgcatcgatatgcaactcttctccatttactttcgtaaaacggaacatatttttatttgacgtagtgtgacggacgaaatggtgctgcagtgtacagatcatttcgtcgttatcaaacaaaagaatatttactccttcgcgtgactcctctttcggtaagaaagataaataattatgacaatacatgcaatcatataaagagtagtgaagtgattgcaatgattcggttaataatgtgaagacagagtcaggtaattcctcgagccattcattatagctaagaagtaacttttttcgaatacgtaccatttcaccattttgcaaatggtgttgctcgttggcgatttgtaatacatcttgttcatagaaacgggctggtaaccaattgttattatacaaaatttcaaacccatcttcggcaatatcttctaatagaaacgcttcatcattttcatcatcaaagaatacccattcattgtttatatattctacattaccgactgtatgagcacggggctggttatataaaatatgtttacgttgtatcatatacgatttctcctttatgaaaagtagttattcctgttatagacagttcgtgcgttctttataactagacacatctagacataggtgggcatacaataaaacacgttttactgagtgagaatgctattccatatgtggatagtaggttatcgtcaagttttttattttttgatccgcactcttagggtggggattactgcacgttcaagaaaagaaataagatggaaggatgatttatatgtgcgggattacaggatgggtggattataaacgctcattagaaggagaaagagatgtcgttacgaagatggctgagacgttagcgaagcgggggccggatgataataaaatttggattaaaggaaatgtcgcatttgggcataaacggttaattgttgttgatcctgagggggggaaacaaccgatgacttgtttaaaagatgaaacgaattatgccatttgctataacggtgaactttataacacagaagacattcgaaaggaattattaagaagagggtatacgttcaaaggtcattctgatacagaagtattattagcttcttatattgaatggaaagaagaatgtgtcgatcatttaaacggtatatatgcgtttgcagtatgggacgaacagaaagaacaagtatttattgcgagagatcgattaggtgtaaagccacttttttataaatatgatagcggacgcttattatttggttcggagttaaaagcgatattgtcgcatccagatgtgaaggcggaagtaacattagaagggttatcagaaatattcggactcggaccgtcaagaacgcctggccacggtatttatgctggtataaaagaattacgtccaggtcatgcgatgacattttcaaagaacggtttatgtatatggagatattggaatgtggaaagtaaaaaacatgaagactcttttgaagaaacagtagagaaaacgcgctttttattacaagatgctattacaagacagcttgtttctgatgtaccactatgtacttttttatcaggtggtgtagattcgagcgctattacagctattgcagcgaaagaatatgagagatcgggaaaagggcaattacacacgtattctattgattacgaagataatgacaaatactttaaagcaaatgcattccagccaaattcagatgctccgtttattaatttaatgactgagacatttcaaacaacccatcatcgctgcgtcatttcgaatgaaaaattagcagagtatttaactgaagcagtacttgttcgtgatttgcctggtatggcagatatcgattcgtcattattatggttttgccgagaaattaaacaagattttgtcgttggcttatctggagaatgtgcagatgaaatatttggtggatatccgtggttttatagagaagatgatttacaatcgagtgcatttccatggatgcgttctacagaggcacgtgaacaacttctaaaaaaagaatggagaaataaattaaatttacaacaatatgtacaaaggcgttatgaagagtcgattcaagaagttcctattttagagggggaaagtccgctagaagcaaaaagacgccaattattttatttaaatatggtatggtttatgaccacattattagacagaaaagaccgcatgagtatgggggcaagtttagaagtacgtgttccatttgcagatcatcgtcttgtcgaatatgcgtggaatattccttgggaaatgaaaatgtataaaaaccgcgaaaaaggtctattacgtaaagcgttagaagatgtacttccgcatgacatcttatatagaaagaagagtccgtatccgaaaacgcacaatccacactatacaaacgcagtaacagtatggcttcaaaatctattaacggataaaggttcgattttacacgaactgtttgataaagagcagttgagcggattgattcagtctggcggcagtgcatttcaaacaccatggtttggtcaattaaacacaacctaactacattaaataaatgcagttaggttgtgtttattttaatttgaaatccataactttgattacaggtggaattggattcttacccgcacgagcaggttttattatatcaactgtaatagaagatataattgcatttactgctgctttcttagattcgttgtttaaattgttccattcatctttcaattgatttaaaagttcttttatttcaattgaagatacagtgtcagttatattagcgagttgcttttgaattatgttttcttcttgatttagtgttagcatatcttttttatattcctttttagggatatcaccttctatgaatagaaattttagacgtgcttttttatcctgaattctattatattgttcttgtaaattactcaactctactggtttttcatcagaagcgtccagctcaacgactgcatcttctaaaaggtttagaaattctttttcaagtatattttctggaacttgaggcatatcacatattccttgatgatgtcttgagctgcaccgataacccacagcaattctgttatgagaccttacctgtctatttcctaaaaagtgttttccgcatcttgcacattttagaacattagagaatacgaaaaaattttgcaatctaacttttcctacctttctactatcttgtatttgttggacggtataccaagtgtctttattgataaaagtttcaaaatcctcttgggcaatatctgttagaatatcctctccccatcgaattttcccaatataaattggattatttatgatataacgtactgcatcataattaaatattttcccttgtttagttttaacaccacgactgtttaaagatttcacaatacttactacaccttttgttttatacatttcgaatatgtattttacaatttctgcttcagtatgattgatatataggttgcctttctttaggttatatcccataggtgctttagctccatttctcagccctaattcagcctttttatgcatggagtctcgtacacgttcggctgttgtttctcgttcccattgtgcaagtgttgcaactaaggtaataaacattcttccagtagcggttgttgtatcaaatatttctgtactacttttgaatttaacattatattcatccattatttttagaattgaatgtaagtctgaaacggaacgagtaaagcgatctaatctgtaaacaagaataatatcaaattgttttttcttcatatctcttatcatttgttgaaaagcaggtcgttctgtatttttggcgctatatccttcatcgcagtaatcatttaccactatccaatcttgcgatttggcgtattgttcaagacgaagtttttgcatatctaatgaaatcccctcttcaacttgcatgtcagttgatacacgtctataaatgacacatttcattaactaaacccctttcttaatcaatattttatgtatatttttaatttattagacgaatactatgtgaaaatataagtttcaataaggtgcattatgaattgaggtcaatcaagtagttgactttcaggtgcagtgagaaaaactcactgtttttccgactgaatgaattcgtataaatcttccatattaatattgagttgagaagcaacgtttttagcggtctgataagacataaccctgtcattgtttgcgtaagaatgtatttgttgtttagccatgccaagtttcagtgctaaatctacttgagttaatttcttttctttcaatatttcattcagtcgacacttgccgactacatacaccttttcaccgcctaattattgaatgattggacttacgctgtataaaaactttcctataatctttatatcctcgcagttatcttgtgagtattgttggtccttaaaactttcatcatgtgaacaaggttctaaaatcattaaatctgtaaatttatacaccttttttaaagttgcgtaatgtccattaacaattacagctgctatttctccattttggacatcaggttgtttttttagtacggcgtaatggccgttagggacaattttattcatggattcaccgttaacaacaagtccgaataattcatcgatattgtgagttttgtatggaggtgcaattctatcaactatatcttgtacagcttccaatggaacgccagctgcgattttaccaataatagggatttccttttttgattcattgtcagtaggtttttcttgaactaattggagttctccatctacaatttcaacttttgaattcttataagttgtatcaatatcagattttgtcactccaaacacagtagccattttttctaaaacccctgaacttggtttggctctgtaattcatataatcgcttaaggtacttcttgcgattcctatttgactagctagatccgattgagtcatatcattttcttttaaaaatttctttatgttttttactatagtttgtttttgtaaatcagtcataccgtcacctcctattgtaactacatttttaatataacacattacgaattattcgtaaagtgttcgttttgtatgattttttcgtacttttgtattgaaattacataaatttagtaatacaataaatattgaaggaagggggtaacaaaatggattacttgaaaagaacattgaatgaacttagagaaagtgcagggttcaatcaagcagaacttgcggatatattagaagtatccccaaaaaccctatggttatatgaacaagattcaacaaacattccagatgaattaatcaaaaagtacatgtacttatttgatgttccttatgaggatatattttttggacctaagtacgaaaaattcgtacttatgaaaaaacgcgttcaagagagagcgaataatttgaagaatattgtttcatgaaattttgatttaaatggatagtcctagtgtcccacaaacatatagatgcattgaggtgattgaggatgagtgggggacaaattattcgtgatgaaaatgggtatgtggtgaaagtaatccttacaagggaacagtggaaggaatttttaacaccgctaataccagctgcacgagagttaatcattcaaagaaaagtggaacaacgaaatataaaaaatgaaagtaaataatttttttaacatattcgcgaaatttgacgataaatattggttctgcaaattaaaggacatgagcaaaagggaagtgagttaattgaaaaatggtaaaaagccaacaaaaaaagaaaaggttcatattaaatcatacaatttgaatcctgataattggttgatttttaaaaaagtaagtaatgaattgcatttggtacatcgtaatacggataaaactaaagttattccgagtttgtagaggaggaaagtaatatggatcaattaacagtagcaaacgaacaagcactagtatttgaaaacaacggaaaagttgttacagatagcttgaagattgcggaagtattcaataaacgtcatgacaatgttatggctgatatcagaactcaaatggagtatgcaggttatgaattttcactcctgaattttaaggagcgaacttatgaaaatagagggcgtcgttatcctaaaatcgatctgacagaagaagcttttacattagttgtaatgagttataacacaaaagaagctgttcaaatgaaaatcaagtttattgaagagtttaaacgaatgaagcaacatatacaaaatcaacaaaaaatacctacagatccaatgggagttttaaagttaacgtttcaagctttagaaggacatacccaggaaattcaggagattaaatccgatgtgaaggatttaagagaaaacgcccctttatatgctatcgaatgtgatgaagtatcaaaggttgtaagaaagttaggtgttcttctattaggtggtaaagaatctaatgcttatagggatgttagccttagaaaaaaagtgtatagcgatatttatagtcaattacatagagagtttgggattagtagttataaagctattaaacgtcatcatttagatagagcgattcaaatcattaatgaagaatattcacttccaatcattttagaagaagaaattacagctacaaatgcacaaataaatatggcggaagttcagtaggaggagcaaacatgcaacaaaagattttagtgattactagtaatttcgcaggttttccaggtatcagtgagtttcacacaaaagaagctgcaaaagaagaagttaaaaagttgattcaaaaaggtgtaagtccaaaatcaattcgtgtaacgcaagaaatacctatgaacattgatattcaagtagatgttgaattttaagaaggaaggattaggtgagagaaataatggaagtcatgattgatttaaatacatttgctgatggagcacttgctgaaagatttcatcaagagtttgagcgtgtaatggaaaatatggcggatttaaatactgatcctaaaaaagcaagaaagattgttttaacactttcgtttgctggtgataaaaagcgtgatgtatggaattgtcaagttcaagccacttcgaaactagcgccaacagaagcggtagaatctaagattctattagatatggatcaaaacggaaatttagttggtcaagagttagcttccgggatccagggacagttttatatggatctacagggtgatgtgaaaacagatgttggacaacctgtagaagaagtagaagagaaggaacaaaatcaggttgctgaaaagcaaacggtagtaatcgattatatgaaaagtaaatctaattaagaaaaggggaaataaaaaatgactatgacaagagaagcaattgaaaaggtactagagattggaacgattgaaacacataaaatcggggaacaaacttattcaacacaaagattacatcttgtgcaagaaccgacaccagcagagattactgttcgtagtttatctggtttagtaggttacgtgaaatcagaatttgacacaactgaacctgtaatgattcatattgtaaacccaacaacggtaagatgctttactgcggttaatggagataaggctagaagtacctatatcgaagcacaagcgtccattccacgttttaattttggaagtttttatgacagagaagaatttaatattgcattgcaatcaggttttgtacaaaacaatcatcgagacatcgttttacaggtagttggtaccgttgtagaaaatgatgtgaaggaaattggagatgatggtgtatcacaagctgtaacggtgaaaacaggagttgcgagtagagggaatgcaaaagtacctaatccagtgcaattaagcccatacaaggtaacacgggtgctactggcgctactggtgccactggacctcaaggtgttcaaggtaacacaggcgctaccggtgccactggacctcaaggtgttcaaggtaacacgggtgctactggcgctactggtgctactggacctcaaggtgctcaaggtaacacgggtgctactggcgctactggtgccactggacctcaaggtgttcaaggtaacacaggcgctaccgggcctcaaggcattcaaggaccaacgggtgctaccggcgctactggcataggagttactggacctactggaccttctggtggacctaccggacctactgggcctactggacctagcttccctatagcaacaattgttgtaacaaacaatattcagcaaacagtactgcaatttaataattttatttttagtactgcaattaacgtaaacaatattatcttcaacggcacagatacagttactgttattaacggtggtatttatgtaattagcgtatccatttctacaactgcgccaggatgcgctccactcggagtaggaatttcaattaatggagcagtcgcaactgataatttctcttcaaatttaataggcgactcactttcatttactacaatagaaacattagcagctggtgcaagaatctctgtccaatctacacttaatgagattacgatccctgcaacaggaaatactaacatccgccttactgtatttagaatcgcttaaatttcactatatattgtttatgacaaataaaaaaagagcgaggaaactcgctcttttttgttatgtacaataattcattactattctaattcaattgaaacatttttttgtggtacaaatgtagaaattgcatgtttataaataagctgttgcttaccttctgtttccagcaggactgtaaaattatcaaatcctttaattagtccacgaagctggaaaccatttaataagtacagcgtaacaaacgtattttctttacggagttgatttaaaaactgatcttgaatattgattgattgcttcatgtcgaatcctcctctttttctctacttactattattcgactttacttgtaactttccttctatgtatcgtaaaatttctgacgttttttcaccgtttgtaacatcaaaccacgtgacatccattttattacggaaccacgttaattgacgctttgcataacgacgcgaattcgtctttaattgtgataccgcatcttctaaagaaactcgattctcaaaataatcatagatttctttatatccaatcgcttgaatagattgacaatctcgtatccctctattatacagcccttctacttcctctaataggccttgttccatcatcaaatccactcgtaagttaatgcgatcgtatagcatttctcgatccattgtcaagccaattaatgaaacatcatagagtaactctttttcttgtttctcaatttgttcactcattttttcacccgacgtgtggaaaatttctaacgcccgaatgacacgtcgtacattatttgcgtgaatacgctccgcactttctggatctacttcttgcaattttttatgtacatattccacaccgcgttctaaagctaacttttccatttgctctcggtatatcacatcaccagcatcatctgtaaactgataatcgaataaaacagattgtatataaagaccggtcccaccaactataattggtaatttaccacgttctgtaatttctcgaatatgcttgcgaacacgttcttgaaattccgcgacagaaaatgaatcttccggattttttatatcgatcatataatgtggaattccgtccatctctgcttttgttacctttgcagttccaatatccatcgttcgatagatctgcatggaatcaccactaataatttcaccgttcaacgctttggcaagatcgatacttaacttcgtctttccaacagcagttggtccaatgatgacagcaactttttcacgttgcacttctcccatattattcaactctctttatgtaatatactccatctattgattatacccaatcttaccaattttaacggcatgattgcaagttctttcatttcggtacatgaaattacacagaaaaaagaacatagtttgtccaattctgcatatacatgataaaaatagtttcgagaggatgagttaactatgaaacaatccaccatcaatttttcatctttgacaaaagacctcattttagctacttctataaaagaacaaaattgttcacaagaggaattatacttcgccctaaattgtttactacgggcttttcattctaccctccatgaaacaacattacatccagaaaataaaaatacagaatatatacaaacgcaattttgcagtgcatataaaattattacaggtaaaactatttatccatttcaataatccataaaaagcggctgcttacataatttcaagcaaccgctttttatattaatatcgataacctattgtataactttcacttttacagatttacgcccccagctattagcactaccatctgaaccgactaatacatcaatacgatttcctttaatcgcaccaccagtgtctccagcaatcgcttctccatatccttctacccatacttttgatccaagcggaattactttcggatcaacagcaattactttcatatttggatttgctgttaaatcatgccccattgcagttaatacacgaccaccatacgaaccattctcactcggatctgctgtatatgccgtcgcttctactgtaatttcacgaccaccagtaggcgcacttgtttcagtagattttgcaactggttttgcagccggtttttcttttaccacaggtttacttgattctacattcttaatagaatcgttactcttaacagactctttattcttaactactgtattatttttaaccggcgtatttgttctagctggcgcttcttcttgagctacaacctctttcttttcgattacaggtgctgttcctgttaaaaatggcacgtgaacatatccaacttttccattgtagtcgaattgtaaccattcattttgaacttgattcgtcgtttcaatcacatcatttttattaagtttacctaaaatttcagaatcagtattcgctccagcacgaacatttaatacgcccgccgttacataatatgtgctctttgtaaaatcggcacttacaaacgcttccttaccgttcaacttaatttttgtccatccattttctgtatttataacatctagtgtattcccacttaacactttacctacaagctttgactctacatttgggttttctctaacatttaatacgtctgttgttacaattgtttccgctttagcagaacccgcaaaaatcccaagaccaaaaactgctgctgttgctatacctaataattttttcatgaatagcctccatttgctttgttttcgtattttcattatagcaacagatttttagaatttttagaaatcacacaattacaaagcattcgtaatatacgattaacgagttgtaacataaatttccatattaataaaatgtatttctcatacaatctccagtggttttcatatatttttcatatacgagcacaagaacttttttccagaaaaaattacagtgttacttttttgttacaaaaaattcacaattcgttacatcttttaccaaaaaacatcaatatttaattgttaacctatttttttgtaataaaaagagagcagctactaaaagctgctctctttttatttgttattgaactttctttttccaaacacctagcataatggccgagacaatcgttccaattaatatagagaaaatatatagtaacggtttatttactaacgctattacaaataatccaccatgcggtgctggtaatgtaatttggaataacatagataacgcacctgcaatacttgaaccaacaacacaacttacgattactcgaaccggatctgcagctgcaaacggaatcgcaccttctgtaatgaacgatgctcccataatataatttgttaaaccagatttacgttccgcttctgtaaactttgatttaaagaatgtagttgcaaatgcaatcgcaagtggcggtaccataccaccagccataactgctgagtgcactccaaaattctgtgcttctattgcagcaataccaaacgtaaacgccgctttattaattggaccacccatatcaattgccatcataccacctaaaataagacctagtaatatagcattcgtaccgtttaaaccatttaaccaccctgtcaacatttcatttaatgctactacaggcggaatcactgctttttgcattacaactcctgtaatcaataatccaaagactggatataacaaaacaggtttaattccttctaattgtactggtagtcctgaaaataatcttttcaaccctaaaacaacatatccagctaagaaaccagcaattaatccacctaaaaagccagcattcgcattcgccgctaaaaatccacctacaacaccaggcataaaaccaggacgatcagcaatagaacttgcaataaatccagctaaaattggtacaaggaataaaaacgcacctgtttttcctccaccaattgacatgaacaattcagctaaaggaccttccgcctttataccaccaaacgaaaacgctagcgctattaaaatcccgccgccaacaacgaacggaagcatattacttacgccattcattaaatgcttataaattcctaatcctttttctttttccgtactttctgcctttccatcttcttttacacctttaaagattggtgcatcttgctttacagctcgattaagaagtgtttccgtttttctaatcccatcagcgactggtacttgaatgacatgtttaccagcaaaacgattcatttctacttgtttatccgccgcaacaataatagctgttgctcgttcaatgtcttcttttgttaaaccgttttttatacctgttgatccgttcgtttcaactttaattgcgattcctagctctgctgcttttgctttcaagctatctgcggccatatacgtgtgagcgattccagttgggcaagccgtaactgccaatacgtacggttcatttccttctggtttggcgacttcaatctcttcttctttttcattctctttttcatcaaatagttgaagaagctcactttcatcctttgcttctaatagttgcttgcgaaacccttcatccattaataatgtcgataaacgagacaacgtttctaaatgagtattattcgctccttcacttgcagcaatcataaagaataagtgtgctggctgtccgtcaagcgactcataattgataccgcttacacttctaccaaaacaaatcgatggttgtttaacagcctttgtcttcgcatgaggtattgcaataccttcccctattccagtcgtactttgggactcccgctttaaaatagcttctttaaattccattttactatttaaacgatttgccccatttaatttctcaactaattcatctatgacagcttctttatttgaagctgtcaaatccataatgactgtatctctttttaatagttctgtaattttcatatgttgcttccccctatcgcttagctacaattacttgcgacaataattcttctactttttccttcttacataaatcagctgaaaatgctgttgcactccctgttgcaacgccgtattgaaatgccttttcaatatcttttgtctgttcatatttgcctacaaaccctgcaacaagagaatctccggccccaactgaattaattacaacaccttttggaacagtcgcttcatatataccttctgccgtaaataataaagctccctcttcagccatcgatacgataacgtgttttataccttgttcaattaattttcttccataaggtaaaacgtcctctactgttgaaagctccactccaaacaactcaccaagttcatgatggtttggcttaattaaaaatggcttatttttaattacatgctgcagtgcacttccactcgcatcgactactactcgaatacctttttcagctccgagcgctgcgattgattcataaaaggtagttgggatagatgcaggtacacttccagctagcacaacgcaatctccctgcttcatactttcgatttgtttcattaattgttcaaattgctcatttgtcacattaggaccttgcccatttaattctgtctcttcttgtccttttattttcacattaattcgggaatctccgtctacttggatgaagtttgtcattacgccttccgcctgtaatacacctttaataaattgaccggtgaatccaccagtaaatccaagtgctatattttccacacctaaacgatggagaacgcgagaaacattaatcccttttcctccaggaaacttcatatctttctctgctcgattgactgcgcctaaatcaaaggaattaacttgtactacataatcaatagatgggtttaaagtaactgtatagatcattgtttatcagcctcaattacattggtttgtcttttatatttttctaaatcaatttctaaatggtttgtaataatatttgcttcttcaacatttgcaattttcgcaaatgcaacttctgaaaacttactttcatcaattaagaaatatccttcgtttgctaatgttaatgccatttgttttaagagcgcttcttctggatctggcgttgtaaagccaagctgttcatgtacaccatttgcacctaaaaaacatttatcaaaacgatacttctgcatactttcctgtgccatagcaccgattaaagctttcgtcctactcttcatcattccacctagtaaatacgcacgaatattattttcaactaaagcttcaatatgcataagtccattcgtaacgacagtcacatctttatttattaaaaatggaatcatttcaaatgttgtacttcctgcatctaaataaatacaatcaccttgttcaataacgctagccgcataattagcaatttgttgttttatttgaatgtttttggatgatttttcaaccatcgttggttcttgcccttttcctgttaaaacagcggcaccaccatgaactctttttaataacctttgcttttccaattgtgctaaatcacggcgaattgtcgactcagagctttctgttctttcaactaattgctgtaattttacaactttctgttcttttacaagttgcaatatcatttgatgacgttcaggagttaacattttattcacctcttctttgattacagtataatgaaaacggtcacaaaaatcaaccacaaacaatcaaaaataatcaaaaaacacccataaacatttataaacagtaaaaagaaacctattcgattaaacaatcaaataggtttcttttctaaattcacttataaagaagctttatatatacttaaaacatcatctttatttaattttttaaagttaccaaattcaccatacgccatcgctttattagccattatatcaatttcattttctccaataccgtaatcagctaatgttgctggcgcttcaattgaagtccaaaattgacgcagcgccttaattccttctaaagccacttctttatctgttttgccatctgtttctatatcaaatacacgaatagcgaactgtttaaaacgacttacattttcctctacaacatgtttcatccagttcgggaataaaatcgcaaggccacccccgtgtggtatatcatgaacagcagaaactgcatgctcaatattatgagtcgcccaatctccttttactcccatcgctaaaatgccgtttaacgccatagtaccacaatataaaatagtttctctatgctcataattttctaaatcacttaaaagcttaggtgctgtctcaattactgtttttaaaacagcttcacaataacgatcttgtagttctgtattcgttccatgatggaaatattgttctaatacgtgcgacataatatctaccataccgtaaattgtttgatctttcggtacagaagtagtatgaactggatctaaaattgaaaactgcgggaaagtaaccgggctaccccatccatacttttcattcgtttcccagtttgtaattaccgagcctgcattcatttcagatcctgttgctgcaagagtaagtacagtaccaaatggtaatgcctcattagcaaatgtttttttcgttacaatatcccatacatctccatcgtacttactaccagctgcaattgccttcgtacagtcgatcacacttcctccaccaactgctaaaataaattcaacaccattttctttacaaatttgaatccctttctttacagttgatacacgtggattcggttcaacacctgtcaattcaaatacttctgcatttatatcctttaaaatagaaattacattatcataaataccgtttcttttaatgctgcctcccccgtatacgagaagaacttttttaccgaactgtggaatttcagtttttaactgctctaattgacctttaccgaaaataagtttcgttggattacgaaatacaaaattttgcatattcctttaccatcccttctatatgaaaagcaactatacttttgtataccatatttttttcatttcacaaaaatatttgcttaataaaaaaatcccagcctacaggctgagattttttattggtaataaggtgagatcattaagtaaacaataacaccagataaacttacatataaccaaatcggcatcgtccaacgtacaattttacgatgacgtgttaattgatttgtaaaaccaaatacaagtgcaaacaatgcaagcggtacaataattgccgccaggataatatgtgtaattaaaatgatgaaatacacatatttaatgaatccttctccgccaaaatgtgttgctggcgctaagtaatgataagataaataagaaacacaaaatagcaacgtcgttgtaaatgctgccaggatgaaaccacggtgcattttcacattcttcttaataatagagtatagagctgctaataagaatacgaacgtaaagctattaaaaattgcatttaacattggtaaaattgttacatcaaaatgtaattctccttcatagccaacaggtccaaagaacaaaaataaaataatcgcatttacaattacagaaagcgttatcacaataggagcatagcttttctgatttgttgattgatccaccaaaatggtcactccctcttccttcaaatatgtatacgtaacctcactattttaacatactattcacagtgtaaatgtgacaatagtttgacacagcaagataagacaaagaaaaaatccttcttaataaaacttcttaagaaggattttatcgctttattattcaaatagcaacgcgattagtttttgttaaaaaatgtatcgctatatgcttgaaaaatttcagacacttgatatcccattaaagaaattgctgttaatgaaaagaaaccaatcataagaaatcgaaaccacatataaatctcctccttgtatttagcttaaaaaacattcgctatattacaagttgagtggcactcttcatcgtcactttcctttttccttacaattgctgtaataaatcgaatcataaagaaaataacaaaaggaatttgttcgtaattcacattggcatagtttagcaacggctcgcgctgcatatcgaacggggatgagaaggaatagaacataccttgctcttccatatatacaattacaattttcatgcaaaatacgattcctagaaacgaaacaatatcttgccattctgtcgtatataacaggttatacagctctaatacgtactcttccattatcatccccccccttccttttttaccattttgctcgccttcgtataaaaagtcaagaaaaaagtttatatccactatgacaatagtaattacttgtttctatgattatatatgattcttttatagcaatgactgggtgtaactctcttcgaaaattagaatcgaacagattcctcattcttacttttaggattcaaaactgtgctatttttatttctattaaaaataaaataagaaagtatgataagaacagtaacaaacattgttaaaagtgcttgtgaacgtaaagtatcaattgcgaacatcgcaactaaaactgctataatagcaacaattgtaacatacgttacatacggaaaaagccacattttcactttcaaattttgttgttccactttccccatttttttacgcatctttaaatgcgaaactgcaataacgagataaactagtaacgcaatcccgccagatgcattcactaaaaacaaaaagactttatctggagaaatgtaactaaacacaacgccaatataagcgaagaaagttccaaataaaacggcccgaactggaacaccactactgttcaatttcaaaaacgcctttggagcatctcctctttctgccatcgaaaaaagcattcttgagtttgtatataaacccgaatttaaacaagagagtacagctgttaaaacgataaaattcataatttgtgccgcagctggtattcctatatgttccaatacagctacaaatggactttttaatatgtttgctgaattccatggcagtagcgtaacaactaccgctatagacccaataaaaaatacaagaatacgccaaatcacactgtttgttgctgtttttactgcttttacaggttctgcagattcacctgcggctaccgctacaatttctgatcccataaatgaaaatataacgacagtaattccaagcagtaccgaacttataccgtttggcataaatccaccttgtccaattaaattcgaagtgccgggtgcttctgttcctggaacaaatcctaaaataacagcaagacctagacaaaggaacaaaacaatacttattactttaataaaagaaaaccaatattcaaactctccaaatgatttcaccgaaaaaacgttcgtcagcgttaataaaattgttaatattaaacttaataaccaaagcggtatttgtggaatccaatattggataataccagcacctgctgtggcttctattgcaataacaattacccaaaaaaaccagtataaccagcctattgtataacccgcccaaggaccaatcgcttctcttgcatacgttgcaaatgaaccacttgtcggattaacagctgccatttctcctagcattctcatgacgaaaatgactagaagtcctgctaatgcatatgaaacgatagaacctggtcctgccgaatgtacaactgcaccacttccaacaaacaaaccagcccctattacaccgccaattgaaatcattgtaatgtggcgtattttgaggtctttctttagatttttatccaaatcttgtacatccccttccaaactaaattttgaaatttatgtaagagtactgtgcgaaagattttgtcctatactttaaaatatatcaaaatattctgaattcaacaattaaaattcaacctccttcaaaaattattacattaggtttaatactttcccatacacaattgttgagaaaattatagtccctttacaaaagaaagaattttcagatattattaaataaacaagattatacatctagacaactttttgtataggagtgttgatatgttaaacaagttcaaatttttttgttgtattttagtaatgttcttacttctaccgttatcccctttccaagcacaagcagcaaacaatttaggttcaaaattactcgttggatactggcataattttgataacggtactggcattattaaattaaaagacgtttcaccaaaatgggatgtaatcaatgtatcttttggtgaaactggtggtgatcgttccactgttgaattttctcctgtgtatggtacagatgcagaattcaaatcagatatttcttatttaaaaagtaaaggaaagaaaatagttctttcaataggtggacaaaatggggtcgttttacttcctgacaatgccgctaaggatcgttttattaattccatacaatctctgatcgataaatacggttttgacggaatagatattgaccttgaatcaggtatttacttaaacggaaatgacactaacttcaaaaacccaactacccctcaaatcgtaaatcttatttcagctattcgaacaatctcagatcattatggtccagattttctattaagcatggcccctgaaacagcttatgttcaaggcggatatagcgcatatggaagcatatggggtgcatatttaccaattatttatggagtgaaagataaactaacatacattcacgttcaacactacaacgctggtagcgggattggaatggacggtaataactacaatcaaggtactgcagactacgaggtcgctatggcagatatgctcttacatggttttcctgtaggtggtaatgcaaataacattttcccagctcttcgttcagatcaagtcatgattgggcttccagcagcaccagcggcagctccaagtggtggatacatttcgccaactgaaatgaaaaaagctttaaattatatcattaaaggagttccattcggaggaaagtataaactttctaaccagagtggctatcctgcattccgcggcctaatgtcttggtctattaattgggatgcaaaaaacaactttgaattctctagtaactatagaacatattttgatggtctttccttgcaaaaataacaaagtaaaactataattagccctcatcaatcggacatttatgggcaatcaatgcaggataaaaacaacaataggtccctttataggtcctattgttgttttttacttatgaaaattactttgtcacatctaaagttttaagaaactcttttccatcgaccaacatcgcacgttccttggaatcatattgttaaatattctagttactattttgcttcaacacaaaaattgaaagctcaggtacactacaaaatctaacaggcatcctagtagtcccaatgccacgatttacatataaatataacggcttactcttcccctctacttcatacataccttcaacgtagtgctcagctagtttggtagtaattaacggacctacaaaaggaatttggacttgtcctccgtgactatgtcctgacagttgaagatcaactgggtaacgatttattttggttacaacatccggctcatgtactaataacatgttgaaatcattttgtttcaagttttttaaagttgaatctatttgcggcttccctaatagaaaatcatccaaacctgatattataatatatttgccgttttccactttaattttctgcacttcatttactaatacagaaaaaccagcttcttccatatattttttgtaaaataaactaccgcccccgcccctatcatgattcccaaacacagcatatttccctaagggagcgtaaattttctgcaaaataaccttcgcttcttctctttccgcactataagacccaaatttatctattaaatctccggtaaaaactactatatctggatgtaattcattcatcttctccactaaatgttcaagttgtttcagtgtaaactctggtcctaaatgtacatctgaaaactgcaatatttttttattattaaactctttaggaattgtagaagcttctatttcattccacgtaactgttactagttttcgttctatttctgtcgcataataatacaaacttactggtatcattaatatacttataaaactaataataaatatctttacgattgatttttttcgttctttttttacatgattcgtattcatgttttcacctctagaaacactttaaatccttattgttacattcatgtgacaacatgaacaatgttatcaatatgtaattccctctctattcactttgacaattttatacagaagtcataacatatttttataatacatagattttcgaaattttttctattcattccatcattttattacggaggggttattcatgtctgtatttacaccagaagaaattacggaacttgctgctaattccggaagaaaaaaagctcatttatcattactccctatgttaattctcggtttttttggcggtgcttttatagcattagggtatttactcgatattcatgttattggaacaatgccaaaggcttggggatcatttactagttttctaggcgctgctgtattccctattggccttattctcgttattcttgcaggcggtgaactagtaactggtaacatgatgacagtttctatggcctggcttcaaaagaaaattactttattttatttcatacgaaatttagttattgttacatttagcaatttcataggggctgtatttgtagcctactttttcggtcatatcgttggcttaactgaaggagcttttttagcaaaaactatttctatcgctcaagcgaaactacaagatacaccattgcaagcatttatttctgcaatcggatgtaattggctcgtttgtttagctgtttggctcagtatgggaagtaaagaatttatcggaaagattatcggtatttggttcccggttatgacttttgttgcgattggatttcaacacgttgtagccaatatgtttgtcatcccagccgccatttttgccggtcatttcacttgggctgaatattttccaaactttatttttgttttctttggaaatttagtaggaggtatgttatttgtagcactaccttacttcatatcttataataagaaactacctgctcatcaagagaagactgaaatgaagaacaaatctctgtccgcttaaatggaatgtctataaagtgccctaaaaaatattacaaatttcattttttttgcgaatatatgtacgtacacttgttctcgaatgttttatacgttataataacaacttaaatagcattatttacatatgaggtgaaaaacatgaacaaaacagaattaattaaaaacgtagcacaaaatgctgagatttctcaaaaagaagctactgtagttgtacaaactgtagtagaatcaatcactaacactttagctgctggtgaaaaagtacaacttatcggattcggtacattcgaagttcgtgaaagagctgctcgtacaggccgtaacccacaaactggtgaagaaatgcaaatcgcagcttctaaagtacctgctttcaaagctggtaaagaactaaaagaagctgtaaaataatgaaaaatatccttctcatttatgagaaggatatttttttcataacataattaataaaaatctgaccattatgttgtttcttttgttcttttatgcaaataaaacctttactttcaaaaaaaggttttgcggtaatgctcgcctctgtatatatctccctatgccctaggttcactgcttctttttctaacttctgtagtatgtatgaagcgactcttttcccttgataatctttatgcgtaaataaacgatctacgtaacgatcatcgttataatccccaaaccccacaatcacacctttatgatccgctacatagctaatattcttttctaaagactgtaaccaattttctctatctagttgctccggtgcccacgcctgtagctgtaactcattataatcttttgcattaaccgtatgaactgtttcatagaacaattgtaatacttgatctaaatcttctttctggaatgttctaattataatatcttttaacatatataagtctccttacgaaactacctcttaacttttctactacatacgattctatatttctactttattatatcgttttaatttctatacgaacaaaaaaaacaatacttattcaaagtattgttttttaattctattcaattacttaatgtagctctttaagattttaatttaactctttgtaatcgtaatgcatttaatacaacggatacagaactaaatgccatcgctgctccagcaacccaaggggctaagaaacctaatgccgcaattggaattcctaacgcgttataagctaatgcccagaataaattttgtttaatatttcttatcgtcattttactcataaagatcgcatcagcaatactatttaagtcaccgcggattaacgttatatccgctgcttccatcgctacatccgttcccgttccaattgccataccaatgttcgctgtagcaagagcaggagcatcatttatcccgtctccaaccatcgctactttcttaccatttgcttgcagttttttcacttcttctgcttttccttctggcaatacttctgcaattacgtgatcaataccaacttgctttgcaattgcctgagcagtttgtgtattatctcctgtaatcatcacaacgtctagacccatttttttcagtcttgcgatagctgcttttgaagtatcttttacagtatctgcaacggcaactataccagcatattctttatcgattgcaataagcattgctgtttttccttctcgttcttgcgcttccattgatttagaaacttcttcaatatcaatattgaatttcttcattaatcgacgtgtaccaattaataagtgttttccttctacaactgattcgataccaaatcccggaatcgcttcaaacgtttctgaacttgggatatcaattttcttttctttaattccttctacaatcgcttctgcaagtggatgttcagaatttctttctgctgcccctactaatctaagcagttcattttcattgaatccatctgctacaattacatctgttaacaccggcttcccatttgtcactgtacccgttttatctaaaataaccgtatctaatcggtgcgttgcttctaaatgctctccacctttaaataaaataccatactctgctgatcttcctgatcctgccataatagatgtaggcgttgcaagacctaatgcacatggacaagcgataacaagtactgctatcattttctcaagtgctccgccaaaatcaccaggtgtaacaaatatcatccatactgcaaatgtgataatcgcaatcacaactacaaccggtacgaaaatacctgaaatttgatctgctaccctttgaataggagcttttgaaccttgtgcctcttctactactttaataatttgagctaatgcagtatctcttcctactttagttgctttcacttttaaaaatccatttttatttattgtcgaacctattactacatccccaattgacttatcaacaggaatactttcacccgttaacatcgattcatcaattgctgactttccttctacaatctcaccatctactggtattttttcaccaggctttacatagacgatatcaccagctactacttcttcaatcaaaatttttatttctgttccatctcgcacaactgtagctgtcttcgcttgtaaacccatcaattttttaattgcttctgatgagcgcccttttgctttcgcttcaaataatttacctaaaataattaatgtaataagtaccgcactcgtttcaaaatataaatctgtcatatgtttcgaagaaccaatagattgaatacttaaatatacactatagaaatacgcggccgacgttccaagtgccacgagaacatccatattcgcacttttattacgtaacgctttataagctccaacataaaactgtccaccaatgataaattgaacaggggttgcaagtgctagttgcacccaagggctcattaacatatccggtaaataaataaacgacgtaaatgagaaatgactaaccattgcccacaataatgggaaagataaaataaacgaaataataaacttcttcttttgtctttcaatttcttgtaatcgatgatcagttgatgcatcttgattatctggtttcacttctaatttatatcctagcttcgtaatcgcactcttcatttcatttacattaacttcatcaggattaaagtctactgtagctgattctaaagcaaaatttactgtcgctttgttcacaccatctaacttatttaagcgcttttcaactctatttgcacatgctgcacatgtcattcctgaaacagtaaattcagctttatcacttacaattccatatcctaacgattcaactttttctttaaactgttgcggatttgttttagttggatcgtacattatttttgttttttcaagtgcaaaatttacattcgcctcatgaacaccttctactttttttagacctttttcaattctatttgcacatgccacacatgtcattcctgatatttgaagattggcctcttttttttcattcatgtctctcacctctatatacccttatgaggtataattattagcaaaataaatcgtacttcatttaaagtacgatttatttccatatctaaaaataattattgaacatcgtatccttggtcttcgattacagcaacgatatcttttaatgttacggcagacgagtcgatagtaacttcaacagttccttctgctaattgaaccttcacttgttcaacaccgtttagctctttcacactgctttcgatagcatttacacaatgtccacaagacataccttcaacctgtaatgttaactgttccatttaaaatcctcctcttgtttattcattgtttgttaatcacaattacatcttaccatacccccctaaggtaatcaatggttttatatcatgatttttcaattattttctaaaagtttattttacacacactttttcacatcaatacgccgagatcttattatgaaggtaaacaaaaaaaacaagccagtgacatactagcttgtttttacgcttttgaaaaacgttcaaatacagtcattaattcttcaattgcttcgtcaccattgccatctttaatagcacctgaaacacaatgacttgtatggttttttaatacacccattcctacttttttcatcgctgcattaatcgctgaaatttgcactaaaatatccacgcaataacgatcattttcaatcatattttgaataccgcggacctgtccttcaattctctttaatctatttataatctgttctttttctttttctgatctatgtgttactgcttcatgctctttatgatccatattatcaccttcttaaagtttctcttcacccaataaaacaattgtttttatgagtataccaattatagcattaaatatctacgcacgataccccataagagtatatttacgctttatgattattcttaacaatgcattagcttcttaatctcaatttttagtataccctttcctttttgtcaaaaaaatcattatatctctcatcaaaattcaataaagtgaaacaagaataagcggggattacccgcccccgcttattcttcatctataatattaaaatcttaattttcagatatttaatccaagaattttttctttccatatataattattgttgatcacatacttttgtatcattcactactgaagttccttcaacggttaccgtatgaaaacagtcatttactcgaactgttacaacattatcttgccggtcaatgatatgatattcattaaaatttttattcagagcactgcgaatttgttctccttcataaattgggatgccatgcgatagaacccaaataagtccagcgatagcaagaatagttttcatacgatctacctccttgggaatatagtgaacttttaatccatactttttcagctctacaaatcatgatcggaataaaccgagcctttttggaaataagttcatttcgtctattttatgtttatgctaattgtgaccgttttgtgacaactttttgtctctttagacgaaaagttgaaacaaaactttcaaaaaggacaattctacatatcaaaaaaggttatggaatgtttcatccataaccttttttcctatatgtaactaataaatctcaaccctttacttaaagacgtcggcacaacagatgcatgattctccccttcagcttcataaaacttaaatttaagtttatcgtggtttacttggagaaggcgctctgataattcatttgcacctacaaccatatgctctcgttctagtgacccaactgtaaggaacactcctgtttcaaacttagcattgtttaattcatttataaggttctcttctttttcaagtacggatttattattccaccatatagatggactactaataaaataattttgaaaagcatttaagtttgtaaatagtatatggagagcaaataatccacctaaagaatgcccaaataacgtttgcttacctttatcaatctcaaaattcttttcaatttgtggtttcagttcttcttcaataaaagtaaagaaattatgtgctcctcctgttttaggccacggtttaccgtctggttttaaaggggcatcttttgaaattacgctaggcgtaaaatcataacatctttcttcccctgaaaatgcgccttcaattggataacccactcctactataacagctggtgaaacaccagttttttccgctcttactgattgtattttaactgcttcatgaaatgtttgaaaaaaggcattgccatctaatacgtaaatgacaggatatcctgaatccggtgctggttgcctcggctttgaaatatgaatttgatattccttaccttctaattttgaatacattttccactgttctgtattagatattataatctgctgtttttcaactgtagtattcaccctatccccccctttttaacttgttacatatatttcgattttttcttcttgagatacaacgctatcataaccgaaacaaacaggagccccgttatacggatcaatcatgacacgtgcatcaatatgaaatacttcttttaatacttcatttgtaatgatttcttctgggctaccagttgtaacaatttctccttccttcattgcaataatttcatctgaaaatcttgctgcatggttgatatcatgtaataccataacaaccgtacaattatgttctttatttaacttctccacaatttgtaatacatctaattgatgagacatatcaaggtatgtagttggctcatctaatagcaacacttctgtctcttgtgctaatgccatcgctagccataccttttgtctttgaccacctgataaatttgcaatttgtctcgttcgaaattcagaagttttcgttatatttaatgcccaatcaatcatttctttatcttttgtcgttaacttatttacgttatttcgatgtggatagcgtccataagaaattaattcttccactttaagttcacctggtgcaattggagtttgcgggagtaaagctaactgcttcgcaatttctttcgttgaaattgtatgtaaatcttgcccttgcaaatatacttttccgcttttttgttttaaaattcttcccattgtttttaacaatgtcgatttaccgcaaccgtttggacctataattgtcgttacttttccttcttgtatttccacatttaaatcgcgaaacactgtaagcttttcataacttgtttctaaattttttgcacttaaaatactcacttttattcctcctcttacgctttcgccttataaagtaaatataagaaatacggtacaccgacaatagaaataacgattccaactggtaactctacaggtgtgaaaactgtttttgcaataaagtctgaggcaattacaagaaacattccgattacgccgcacgtaggaattatatacttatgttgaataccgacaagtcttttcgctatatgcggtgccattaagccaataaaaccgatactccctgaaacagcaacacatgcactcacaagcccgatactgcttaataataaaatcgatttctctctttctactgaaacacctaaacttgtaatactcgtttcttccaattggaataaatctaataaataagctttcttttgtataagtggaattaagataataagccatggtaacatagccacaatatacttccagttcgcactatatatgcttccagacacccacactgcagccatctcgaaatcagttgacttcattttgagtgataagtacatagaaaaagctccaaatcccgatccaattgcaatccctgttaataaaagtcgctgcgaatctaatttaccgtttttccaagaaaacagataaatgatgatagctgcacctaatccacctactaaaccaaacattggcatcatcataatagaaacccagtctgtgctttttaattgtccttgaaagaaaaacataaaaatgacaatcgctgttcccgctccggcatttactcctaaaatacctgggtccgccaatccatttctcgtaatcccttgaataacagcacctgcaacaccaaggcctaatcctactaatccagcaattacgatacgcggaagacgaaactcaaaaataactaaatcatgttctggtactggatcaattctaaaaagtgttttaaatacatctgtaatcgtaatgtcgaacgtaccatttgttaaactaatatagatagcacatagtattaaaaatataataatccccatcgtcattccgaaacgttgacttgaacttttaagcatgtctctctcctcctctagtacggattaaataaaggaagaaaggaattccaattaaggaggtaacgactccaataggtgtttcaaatggatagtttacaaatctactcaaaacgtcacataacgctaagaaaacgccaccaataacacctgcacatggcaaaatccacttataatctaccccaattataaagcgggtaatgtgtggaataattaaacctacaaaaccaactttccccactaaagcaactgctgttcctgttaaaaaaattaccgataaaattgccatcgctttaactagttttgtacgctgtcctaaattaatagaaacctcttcgcctaatgaaagaatggtaatagattttgatattaacaatgctaaaattattccaattatcccaaacggtatcgtgattttaattatattaggatctacttgatctaactttgcattaaaccaaaaactaacattttgagaaatttggaaatacgaagccattgcagccgatacactgcttaaaaatgttccaataactgttcctataatcgctaacctaactggtgataagccattttgaaggagcgaaccaaaaccaaacacgataccggctccgagtgcagaaccaatcattgaacatataaccataccaattgatgacattcctggaagaaaaattatacaaagtgtaataacaaaggcagcaccatccgtcacacccataatagaaggggatgcaagatagtttcttgtcatcccctgcataagtgctcctgatatggctagaaatgctccgactaaaagagctgcaactacccttggtaaacgtgaagtaataataatattatgatttacatcacttgaatcaaaatgaaataatgcgttccacactgtttcagcatcaatacttttcgccccatacaaaatcgaaagtataactgtaaataagatgagtatgggtgctatacataatatagttactggtactgcatttgttttctgcatatcattcaacgcaccttacttattgtattatttagataaatttttcactgcttcttttaagaaggcagttttactccaagcagtaccaccttgcgccattggatctacaacgtttacaaatactttcttttccttcgcagcattcatactttgccaaattggattactttcaatttcttctaacacttttggatttttattttcacttgcctcatattgtaagaaaatataatctgggttaagttcagcaagtttttcaaatgaaattttctcttgtgcttttacagttttcaattgttctggagcagttagtccaagatctttataaattacagggttgaagtatactccttctggatataggaataattcgtttgctcttagtctaatgacaagtacttttttatcttttaacttatctcctagttttgcttttgctttttcagcgtctgaattgtagtctttaataattttttctgctttatcttttttaccagttaattctcccattaactttaagttatcttcccaatttgttgaaacgtgtgataccgggaatgtaggagctactttcgtaaacttttcagctgtttctgctgggaatttcgtacttgatgtaatcacatctggttttaattgtagtaatgtttcgaaattgggttgcattttctcaccaacagatttcgcaccttctaactctttttccaggtattttggtagtttaccacctacagtaatggcaccaactggtttaattccaagtactgccgcatcttccattgactctaaactagctgtcgcaattttatctacttttgctggcactgtatattctttacctaaatatgtaatttttcgtttttcatcttttttcgtttccgtagcttttgtctgttgtttttgctcgcctgaagttttatccgcactattacatgccgctaaacctacacttaaaacggtaaccatccctaaagtaaataatttcttgttcatctttatatgtctcctctcaaattttcaaactatattctcaatagaatttaactatatgaatcttattccatatatatatttcattagattaataattttatccagaactcattcacgttcacttcccctagactataattcttttacgtcttcatcacttgataatcattttcactgataatgattatcgttactaagtatatatttaatatgaaattatttcaagaatgatttgaaaaattttaacaaactgaattaaaaaaagaagtatctccctaatattagggagatacttctttttttagaaatttatatgtaattcaactggacaatggtctgatcccatcacttcactattaattttcgcttctgtcatctggtctttcattctttccgaaacaacaaaataatctaaacgccatccgatattttcacctttgtaatcttgctcttacatttatgaatacatacatacgcactttattcaggttatactaatttcagaggtgatgttctttgcacaatgaaggagttacattaacaaatgagtattggcaagcaattattcataacgattcttcctatgatagcaaattcttttatgctgtgaaatcaactggaatcttttgcaggccatcatgcaaatcaagaataccaaatagaaacaatgtacgaatttttcatcatgcagagcaagcattaagtgaaaactttcgcccgtgcaaacgttgtaagccaaatgggatcactttacctaatgaagagtgggtagaacaaattaaagactatatcgaaaagcattatgacaaatccttaactctcgacatgcttgcgggaatgtgtcacggtagcccttttcatttacaacgtactttcaaaagaataatagggctaactcctatagaatatatacaacaattcaggattcttaaagcaaccaaataccttttacacacaaatcaatctattaaagaaattagtactgctgtcgggatagaaaacccagagtatttcgcaactttatttaaaaagaaaaccggctttactcctactgaatatcgaaaaaagaacgagatgaaagagggatacgataatgaattcctacaaaaataattatatatattggacgctacttacacataaaaattggcgatttcatattgctgcaactgaaaatggactatgtttcattggatcacaagacgaaaactttgaagaattaaatatatgggctagaaaaaaactgccccaacatatattgattcatagtccagattacttgcaaatatatacgcaagaagttatcgagtatttagaaaacaagcgagaaacttttacatttcctatcgatgcttatggaactaattttcaattatctgtttggaatacggtacgtgaaattccttatggaaagacatattcttatacagaaattgctgaaagaattcaaaaacctaaagctgtgcgcgccgttgcttctgctattgctgctaaccctctccttattactattccttgtcaccgcgttattgggaagaatgggaaactaaccggatttaggggtggattagaaatgaagaaaaaattgcttacattagaaaagttacaggtggaattcatatgacagcagaatataatagcgcattatctatagcagttccaaaagaattttgtttccaagaaaatttacgttatctatcacgttctaacaatgaatgtatgtttcatattgaagataacaaaatttataaagttatccctgttcaagatgtaaatcctttagttgaaattagtgtgaatacagatggcaatattcaaatacgttgtttagaagaatcatatacatctgaaaaatcgatacgtgaagctgtagctaactatgtaaaagaatggtttgatttaactactgatttagctcccttttatacattagctaaacatgatttactccttcaaggaccaattgaacaatattatggccttcgtaatttaggtattccagacttatttgaggcactttcctggggaattatcggtcaacaaattaacttaacatatgcttatacgctaaaaagaagattagttgagcaatttggcagttatgtagaatgggacggtagaaagcattggatattcccatcacctgaaacaattgcaaatctacatgtagaagatctccaacaattaaaaatgacgactagaaaatgtgaatatttaatcggtattgcgaagcttattacagagagaaaactatcaaaagaggatttactgcaaacacaagatgtaaaggttgctgagaaacaattaaccgctatccatggtataggaccatggactgccaactatgttttaatgcgttgtttaagatttccttcagcttttccaattgatgatgttggtctgcataatgcaattaaatttataacaggttccgaaaataaaccgactaaaaatgaaataaaaggtttcgcggcaaactgggctaattgggagtcttatgcgactttttatttgtggcgagtactatattaaaaaaaccaagtagcacattcgtactacttggttcttttttaagcttgctcctcaaaacgtcttgcaatttccacaataacttgaacggctttttccatagtatctaccgaaacatattcaaatttaccgtgatagttttcaccaccagtgaaaatattcggcgtcggtaatcccatatatgataattgtgatccatctgtgcctccgcgaatcggatgaatatttggttcaatgtctaaacttttcattgcttcatatgcaatatcaacaatttctctcaccggttcaattttttcaagcatgttatagtattgatcattcatttctaaaacgactgcatcttcgccatacttttcttgcatagtcttcacaatatttttaacgttatttttacgcgcctcaaaattttcacgatcaaagtctcgaataatataatacgctttactttgctcaacatcaccatttaaagaaagtaaatgatagaatccttcatagccttctgtatattctggcgcctcttctactggtaaatacccgttaaactccatagccagtttagtagcattgcgcattttatttttcgctgttccaggatgtgtattcgttccgttaaacgttaacttagcacctgcagcattaaaactttcatactctaaaccacctaatggacctccatccatcgtataagcgaatgatgcaccaaacgcttctacatcaaaatgcgctggcccacgaccaatttcttcatccggtgtaaatgctactcttattttcccgtgcttaatttgcggattatgtattaaatggttcattgcaaccataatttctgtaagaccagctttatcatctgctcctagaagtgttgtaccatcagttgtaataatggtatgtcctttatatgatggtaattccgggaactgctctggtgttaacacaacatttagctcttcatttaacgtaattgcattaccatcaaaattttcatgaatttgtggtttgacgtttttccctgtaaagtctgttgctgtatctaaatgggctaaaaatccaattacaggaacatccttgtccgtattagctggaagtgttgccattacataaccattatcatccatcgttacttctgttaaaccaatttcttttagctcttccactaataacttaccaaactcaatttgtcctggtgttgttggtactgtatggctttcttcatttgattgcgtatcaatttttacatatctcgtaaatctttcaataagttcttgtttcaagttcattcactcccttttatgtttctccctccattataatccttaaaacgaaatattttaacttttttgaatgtgaagatgtatatttcatttacattgttaacacttttacatactttacataacaaaaagaaaattagtgaacatatttaaagtgcagattaatacaaataaatccaccctatttacgactctcaccgtaaatagggtgtttctgtttttatctcgcaatttaagaatatatactactcatttacaataaaagtatatacatcatcataaatacagccatttactttaatcacatacttcccaggtttattaaaactaattgtgtatttatttaactgaattgcttctttatctccagaaagaatatcaatacttctgccacttaatacatacaattcatttagattcatcgttacatcaattgtattgaaattttccactctcacttgctgtgcttccgcaacgcttacacttggttctaaaaacagtagtccacttaatccaatcgtccccgctaaagcaactcccgcaaactttttaatctgtttcattacaatgacctccttatagattttgtgtaaaggcaatgtcccccttacaccacaaagcctatatgtaatgaaatgaaaagtaaacggggactgtaagacaaaattctacatctttttctcctattgaatataaatccaacgtttggagttttgacacatttaaaattgtttccctaaaccaatttctccataatttattcaaagactgaataattacttatttatttaacattctaaaaatagttgataaagatgctttctattcaaaaaaaagactttgctataaaagtaacttttacaacaaaatccatgcaactaattttattcctctttccataatctctctacattcattaattgttcttctttaaactccatcttatatatatccggttttgacgtattcattaaaaattcaaaaccatattgtttatcaaaatagttcatcattaatgtcatgacaagcccatgtgtaccaattacaattttccatccttgaaaatccattaagatttcttttaatactttcactactcttctctggcaatctgcatatgactctccttccgttcgtgcaaagtccggattagagaacatcttctgtacaagtggatacacctctttgtctgatataacctgatcctcacttgaaaacatacactctttaagattttcatatactactatttctttttcatggaaattagctgactcctctatcgttagcacagcccgattataaggacttgaaataaaagtatcaatcctctccgcttttaatatgtcagttactctacgggcatccatatgtcccctctcagttaacccgcgcattctttcatttccttctagttttggtgattcaccatgtctaaccatataaatatatgtgctcataatttctccttaaaattttttataaagtgaaactttaattagcccttactaatcgggcttttacaggaaaatagcgagataagttaataaatcacgttcatttatcccatttcaacacttaggcgtaatactacaatactttataaactgtgctgatttgttcgtctaatccattctcctactaaactctcaaataattcaggctgctcaatttgcaaattatgtcctgccatatctaacactgctaatgttgcccttggatattcttcaataatttctataatattttgataacctactgatatatcttgtcttccagtcagtaaaagaacgggattttcatattttttacgctgaaaatccatagtaagagagtaattcttttgcaacctttcaataaattcatcattagcaacatctaacccaggcttaatttcttctttaaatcgcttatatgtatattcatttgctattacagctaactcacaaaatgcctctctttctgtggaagtgagcgtatttaaaaattcctcatcttgtacaattacctgtttatctggaagaatccttttttctggctccgctacaacaacaggacatactaatagtaatccgctaactctctcaaacatctttgcaagtatacctttggctaaatagcctccatatgattctcctaccaataaaaatttttcagtagaaatgatttcctcaataaatgtgataagcacttctactatacgatctgaactatttatccaatttggagcattcgattttcccattccaggtaaatcaatatatattcgcttataaccttcatatttctgaaatactgattccatacatttcatcattaacctatggtcaggggcgcagccatgtatgataatgaccggtttaccctctcccacaatttcatagtatatttctgcatctttaattcgatatatcataaaaaagcctccctatttagtggcaatactattccactctgtaagaatacacgttcttattttacatcctttctcaacattttcacaaatgttaattttcagattaaaaataaaaatctcacaaaaaaagatactcatcattttatatgcaattttgcatctccacttacaaatcactaaaaaaactttacaattcaaaggatgactaaatatacaatttctatttaaagtcttgatacagtctatactatcaaccgcaatatttttttaaccttaagaatactcacactctttaacactttccttataaacatgatttttataaggaaatctgatacaattcttaaataatattattatgtatagatataacgaacatagtgcataattaaagaaggtgatttcattgaaattaaataaaaatttacaattatgtatattaatcggaacattaatatgctattcaatctattttatgtttttctatctattccctactcatttttcaaattcagatgtacgcttcgcttcacttgtcgttgaagccattacatttgtatcactgatttactctatatattctaagaaagtcagttcaaatccgttttggatatgtattacaatagcaattggtagttttttattaggaaaaatagtatatacatatcaagatagcttcttcgaaattccaatacatcgttttacggtttctgatgtattttacatgttttttctatttttctgtcttatcgctttctgctataaaatcttaaaggaatgcaataaatgggaaaaagcgttctttatttgtgatatatgcatagtgcttacttccatattcacattagaatggtatttatttaatcaaccaaatttaaatatattcgctctttcactaggagatgttttcctttcatttttatacccaattgcagatttattatttctactgctaggtgttagtctctttttccgtccaacaatttttaattccaaacggaaaatttatatctttatttttgtattaataagttctgcaacttttaactatatttatttttacttaaataaccacttatcaactgaaactataatattattacgtcttttatatagaatacctatattacttattgcaatagctggctctatttcagaagatcataatacccataaaaattatttccttgtaaaccctataataggaaaaaaagctttagttgtatttccctatcttgctgttgcaatactaatcgggtttacattaaaagaacaaacatcatcttcaactctcattacaggaaattgtattacttttattttcgtactcattcgtcattctatcgtacgtatgcaaaacaattccttaacaaaacgtttgcaggcatttaatgcccaactagaagaaaaagttactttacggacgtctgatttagttcataaatcagaggctctttctcaaaaacagcaaaagtttaaatcattatatgaatatcatcctgaccctatcttcaccattgatttaaatggaatattcttaaatgtaaataaggctgggagtgtactacttggagcaccaacggatgagttactaggtgaaacttgtttttcgatcattttagatgaagataagcataagctagcattggcattagaaaaagtgaaacaacaagaatcggcattcttacaacttagttctcaatataaagatggctttacttattttttatacgttacaatcattcctattataatagacggacaaatttcaggaagctatattatggtgaaagatattactgcactaaaaaaacagcaagaagaaataaaatatttagcattccatgacactgtaacgaaaattgggaaccgtgcctttttccataagaaattaaagagagttataaaaaatgctaaaatagcagaaagcgagtttgcattattatatttagatttagatcgctttaaagcaattaacgatacacttggacattcatcaggagattacatattagaagaagtagcaaagcgattccaatcatgtcttccatcacatactcatctttcaagaatcggtggcgatgaatttacaatcataattgaaaactatactgacgaagattacttattccaattatgtaaccaattatttgaatgcatgaaaaagtcatttatcatacatgagcataaattaactttatcactgagtatcggcatcgctatttatccacattccggaatcgataccgctacacttctgaaaaacgctaatgttgcaatgtatgatgcaaaagcaaaagagcttaactctgtctctatttatgacgatgtaatcgctaaaaaaattgaaagacgattacgattagaaaaagatttaccaaacgcactacaaaatgaagaattgttccttttgtatcaacctcaagttgatagtgaatctaataaaattatcggtgcagaagctttaattaggtggaatcatcctgaattaggtattatttctccatacgagtttattccgattgcagaagaaacactacaaattatttcaataggaaaatggacattagagcaggcttgcaagcaaatgaaacgttggcacgcactcggatattcacatttaaaaataggtgtaaatttatctgctaaagaatttgaacaagaggattttgtaaagtctatttcttctactttaacaaatacaggtttaccagcaagctctcttgatcttgaattaacagagcgaattgcaatgatggatgagcgagaaacattgataaaactgcgtacactaaaaagtttagggattcacatttctatcgacgattttggtacaggttattcttcgctagcctacttacctttgtatccaattgatacgttaaaaatcccgagagaatttattacaatgtctgaaacatgtgatgatggaatggaaattattaaaacgatcatcacattagcaaatacattaggaatgtctgtcattgctgaaggtgtagaaacgaaagagcacgtaaatttccttcaaaaaaataaatgtcagtttattcaaggttattattacagtaaacctattcatattcatgcatttactgagctattagaaaacggcattcaccgatagtacataactaattagaataaataataatgaatttgaacaaatatagtaaaaaggaaagaaaataccttctttccttttgtttttctatttacatttctattactccaccacttcatttattatatctattatttgatgaattccctcatcatttgttttcttatatccattcatgttttgaatatatttctccttatttgtatacaacttatttgctgcatgtataaatgtattcgtacttactctgtcttggagtataacttccgcatatccttgccgtgaaaaatattcagcatttaaaacttgatctcccctgctggaactgttagttaacgggataagcaacatcggtttcttcaaaaataacaattcagaaatagcagtagaacccgctctggaaactacaacacttgccatatttagtatatgcggcaactcgtcgcctatatattcaaattgcatatacccctccatgccaatagatgggtctaccttccctttaccacatatatgaataatattaaagtttaatagtattgtatctaaacattcccttaccatatcatttatccacttagcaccttgactcccacccataattaataatactggtttatcttgctgaaattcacaatatcttcttcctcgtaatacgttacccttctcaatttcttcccttacaattggtcctacataaaccttcttctcattacttacattttctcctgtctgaggaaatgttgtgcatagctttgtagcaaaaggtaatgctattttattggcaagtcctaatgtgctatctggttcacgtataattataggcacacgatttaaccatgctcctatagctacaggaactgaaacaaatcctcctgctgaaaagataacgtcaggctttgttttcttaattaatttataactttgtaaacaacctcgtataattttaaaaggatctttaaaattttcccaatcccaatatctcctaagcttgcccgttgaaacactattgtatttaacattttgcactaatgatttttcaattccatttttggatccaatatactcgactctccagcctttctctataaatttaggaattaatacaatattaatcataacgtgtccggctgtaccgcccccagtaaaaagaatcgttttgctcataacttatacccacctttattattaaaaatctagctttatatttaccttttaaatgtaaataaaattattattttttatataaatctttaactccacctctatatcttgtaaaagatctttaatgagttcataaaaatcatttccatactcactacactcgtattgagcaaagatttgaatcacatatctagtttccgtctctaatgctgactttatttgattaacccttttttcttctacatacgcttgatatttatgtattgcctcataaagacgcaatacatgcgcttcttcatctctccaatccaacgcatcaacaattgaaagaaatagcgtattttgattatctattatttcataatcattcatatattttttacacccttttttgtttttcattgcatgcagatgtcactacacttcgcatactcaagtacatcttttaatgattgatgaaattcaatttctgggatccaacctaacctttttatttcctctattgctaaactctcatttgagtcgctcccacttttctctgtttcctctataaaaaaatttagctgtgttaattctttatattgttctagtacatttaacaaagatcgttttactcctgatccgatattatattgttttccatttattccatctcgtaataacacatgatacgctttaatcgcatcacgtacatctagaaaatctctactatctttcaaactgtttacttcaataatggctttacttctacctgattctatatctatcattttctttgcgagaatcgaacaaatgccattcgattcccctggaccaattaagtttgagggctttgcaatgataatatttgaatccattaatcctccccaagcctctgcaataataacttgcatcgttttacttaaactatatggatttgaaatttttatttcgttcatactatctgcttgcaaagcagatcctataactaatgttctacaatgcgaggcttcttgcttaattgcttctaataaatataatgttcctattacattaacctctatatattcaagggcagctgtccaagattctataaccgaattccttcctgctaaatgcaatacgtagtctggctttatttgtttcattaccttcattacttcgctcttattagttaaattacaagtaataccatttctaattttttctccatatgcacgattttgaaacataggaattacatgaaagccctgctgtaaaaaatagtggcaagcatggcgtcctgtgaaaccatttgcaccagttattaaaaggctcgcattttttttcatcgcaaaaaccctccttttaatagcatttgtttcacctcatgttttgcaagtaaatcttgttgagaactaaaactcttcacatccactagaggatagcttgaataatattgttgaagtccttgtataggaatagtcggtagtaccacaaaataattttgatcaaaacttatacttgttttactctctacctcagatagaagcatttcacttaatttttcacccggtcttatccctacctcttttaccttaacattttcttttccggaatcttcaattaatacttctgctaaatctgttattttacatgccggcattttcataacaaagatttccccgcctctaccttgagatacggctttaaataacaacccaacagcatcttcaactgttaagaaaaatctagtcatattcgcatcggtaatccctacttgtgaagattttttaatttgttgtttaaaaagtggtactacacttccactcgttcctaaaacatttccaccacgaacacaaatgaattttgttttcttcgtttgtatattcgcatgaaccattaatttttcaccaattgcttttgtcatcccatacgtatttgatggatcagctgctttatcagttgaaacatatataactttttcaacttgcatctgtatagaggcttcaattacattttgcgtaccatgtatattggtttttatagcttcataaggataatactcacatactggaacatgttttaaagctgcaagatggaacacataatgtacaccttggcaagcatagactagttgatctttatcacgaatatctccaataataaattttaacctatcatcatttataaactgttgctgcatttcaaactgaaccgtttcatttcttgaaaaaattctaatttctttcggtgatttttctaatagttgttttataagttcatgcccccacgaacctgtaccaccagtaattaaaattattttatttaacattcttcttcctcctacgaaacatctcaatttaaataatatttattgaattattttcaattgattcaaatcataatcgtcgtttgttacatttaattgacaaaataaaaaaacagaaactattaaacgtagtttctgtttttcatttcatctcacaacagtaagattttttatactgtttgcatgataaataaattccttgtaaaaaaacaccgctcatttatttcttatactcgtaataaaataaatagaatgattcatagccaataatcatatttaaatttatgaaaaagggaggtaacggaatggaccgaagcaattcaaatcatacatataacggaccttccaaagcactgcctctctccctattcgacgtaaaaaatgaattgaaacaaaaaagcaaacttattccttctgacaccatgtataaattaacgaaagaagaacaactcatcatcaacaaaataaaaatacaaacagaacaactaaataaaaataatgttacaagaacacgcgcatactaccaattttacattcaatatccagaaatacattgggcactgcttgggcatatggtatcacgtaacggcggttggaatatgactgatttaaagggcgatttatatacgagaattttatcagagaaagatcaattcatatttttttcttttttagaaagagggaattggcttattttccaagatgtataccctcaatttttactttacgaacaaagtgtaaagagatcacaaaagttatttcaccttctccctcacctaaatgtttctacatttatggaaacgatgtggaaccatttttggaaaacaggtaacaaaaaaactttagcaattgcaactattattaatgaacaaaactacttagaaaaaagagtaattcaaaatgtacaatttaaaaagactgtactaaatagtattggatttaaactctttgatttctttcagtttaatcatatccttttcccattctacgaaaatgataagaaacaaaaagtattactatttggtgatacaatgaaacatttcacttccttacatgaacggatattaattggaaaaagattgtactcattattatttcgagatacacatgttttatctcaaataataagctgggctcaacaccatccacatacaggatctaggaaagattactggccccatttattttcaagtgtaaatgaatctttttcccgtgagttttataagcgccgaattaagaaatgccagttacgaaatggctcttatcgtatatacagccctgcactcatctatgcatggcgagatatgaagcatgaagaagttgacagtgaagattggtttaccgattggcaagttgtaaattacttagttgataaggaggaaaatataaatggacaaattacagaagactactgcaaaacactcgaaaaaattgaaatcgccattctcgcaaagaaaaatgtcctcctccgagaagaagaatgagtttctagcattagtagttacaatctttctctcttctattattgcaacttgcttagatgccttttttgttcataaacaaatatattcctttccggctaggcccttctcatccacattttcggttaatatagcttttacattgttcgtactgccgattttaacagttatctttatacacatttcaaaaaaattatctaaagtttctagaatttcatttattatttcaatcggtatttgtgctagcctttttgaacagattgctgaaagtttaggtttatttgtacatagtgcgaattggaaccatacatattctttatttggttatataatttttcattcttttatttggaacgtatataattggataaaaaaataaagagaccattataggtctcttcttaagcatactcttccgttattactaatggtgtcaatgtttgaaggcttttagagcgtaaacgataggcaacgactttcttcttatattgcttaatgacatcaacatgttcctcatagctatatagcgaaaatctaatctctttactccctttcttcgtatcaatgactattggtgtcccttctccgtgcggcgggaaataatgtttatctaaaaacaacgcctcattaaattcatgaataacttgtagtttcatttctccctctatattttttccatctatcgatatagaagtattttccgcctcaagcttttgatgcaattcaaatctactaataattgattctacaacagaagtgggcatgctagaaactaatactttaatagctccaaaaacaaataatgtaactataaaccatgttgtcattgttatcatctccattacatttaaaaaataaatttcgttccatacggtattagtatactaataagtattccagttacaatcatcgttaccgaaccgatagtcgcttctttctcgccttctttcactaaacgactcacaccgataatatgtgatgcacagcccattccaactccttttccaatcgtacttgttatacggaaaaacttaagtactgttggtccgatcatagcacctgttattcctgcaacaactacaaaactagaagtcatagatggaataccaccaatttgatccgctattgaaagggcaattggcattgtcgctacctgtggtaaagtagttaatataagttccttatctatatttaaaattccgccaatcactacattcatgctcgttacagccactatacctatcactactccgattagtatcgatgaaaaatttttcatcagtatctttcgctctttaaatagaggtatggccaatgctacaattgcagggctcaataagcttgaaagaatgtttcccccattttccctatactcatgatgagaaataccaaaaatcaaaaataaacaaatcataattgccgtaactgttaacactggtaacgtaaatgcaaacgtaaattttttatatagctttgtcgccaagaaataaattgctacagtaataataattaagaccatttgaatcgtgcaccttgtcgattttatttttttgatgtgactaataattgacttatataccctgaaacaatcaaagttactacagtacttgcaactactaaaaggaatataatacttcccttactgaaaagaaaagacccgtattccatgagccctgttgtcgaagggattaaaaataacggtaaaaatacgattaacttttccgaacctaactcaaaccattctaacggtaaaacgcgagtggaaaggagcaggaacagtattaacatccctattaaattccccggtattgatagatggaatatttcctgaatccacgtacccactaggctaaatacatatagcacgcctacttgaagtaaaagcgtcacgtacttcatttctttccctcatttcactatcacacatccatattatgaaatctcatttagcgtgtcggcaaaccgtttaattccaagttgaatttgttctatattcgctctaccaaacgtaaatcgtatatattcatttttcgaacctaaaacactgcccggaacaaatgcgacaccattccgtatagattcacctaataagtgatattcatcaaactttcctgttactttacaccatacatgtattccaccctctggcacgaaacattcaactcgttctcccaatgttccttcaagctctgcaattaattcatctcttctttgcttcaattgtccacgaagtatcgtaatatgtgtatggaaatcctttgattctaaaaattgatttgctacccactgcgtaaatacactatggccaaaatcaacttgttgctttgcatctgctaaacgctcaattacgcgtgtaggaccaattacccatccaatacgtaatcctgatgcaacaatttttgatagtgaacttatataaagaacatttccattttggtccattgattttaatgttgggttcacttctccattaaaggagattaaactatacggatcatcttctacaattggtataccgaactcagaagacagttctaaaatttttttacgtctcgctaatgaaagcacagtacccgtcggattctgataatctggattcaaaaataccatacgaatgcgatgctttttgtgcaaatcgattaagtcatctggattcattccatgctcatcaacaggtaaatgaaatatgtttaaaccggccgatttaaacattggaagcgaaaaacaatacgaaggatcttcaatcgcgatcgcatcgccaggttttaataaacattgaacgataagattaagcgcctgttgtgctcctgacgtaataagaatagagcttgaatctgcttcaatttgtttatattgctgaacatgtgctgcaattgtttttctcaacatctcatttccaagtggatggtcataaccgaggttttccataaatgttttctccgacaaaattgttcgaaatctatcacttggaattaattctggtgacagttcaccacttgctaaattaattaaatcatctttttgtgtttccgttcgaatttgttgaacgagtggtacgttaggtaagaacgatccatcctccacgtacctaccccagttcggtattcgtttatgtgagacaccccatatgtctgtattcacccgtgttccgcttcccttttgccgttctactactccaagtgattttaattcttcatacgcagctactattgtactccggttcacctgtaattcctttgctaacatacgctcagaaggtaacttactatcagaaggaaattcgcctgaagaaatacctctttcaatataatcagcaatttgtttatatacaggtgtcttatctgcacgatttggtttccattccatatagttccctcctttcaaaacgaactatcctcattttttactaacagtattcaccgtaaaaatagtattaattagtcacattttcttatccgtaaatggatatatccaaaatggttctctttctgattactcgatagcttctaaaattccaacttcatactctcatttcagttcttttacaaactatcagatcatgaccgcataccatgttaccccaactagtagaacaaaaagaagaagaatatagattgcagataagtttttcacatttctttttgtagacttaccgtaattctcctccacgtttcttgcaactagtacagtcccaaatagcgatacaattacaataataacgactagtgaaattgcaaaactcattgtcttttcacctctctaagacccatctattttaattaaagaacttacataaaaaccttcctctttaaaacgttgataacatactacctttcttctcttatcataatagatgtttgcaaaaagcggaccaaccactttcgtgtttttttgctcatccacttaaaaaataaaaagcaactgatcacttaggaccagttgcttttttcacacaataatttttcatttaaaattaattcgatttaaaagtttcgccttttcataatgaaacatcgactgagataactcaaaaattgttccatttacaagatacactgtattttcaataagaagcgccggatcaccttcatttaattctaaaaactgtgcattttctttatttactttttcacaactaataactttatcagcaaaaccaatatttaatcgtaaatcttcaatgaaataactgtatacagagcttaatgctatttcttcgttcaaatatggaataatatcctttttgaaataacttacttcaatagagaatggtttagcatctacaattcttaagcgcttcaaaaaatacaacctagttccagcttcgcattgcatctgctttgctatctcttcgtccgcatctattacttcaagctctaacactttcgtttcaatattttgtgaaacaagatttttcgttaatccacgtaaacttcctaaattaatgtaatctgttacagaagtttcgcgtaaaaacatgccactaccttgcacttgaaaaatataacctctattcacaagctgactaattactttacgtatcgtattacggcttacttcaaatcgattcatcaacgcttcttctgtaggtagttttttcgtttcattaaaaagcccatctcgaatgttttgctctaacacatctgcaatttgtttatactttgcactcatacactttctcctaaaatactcttttatctgttataactcttcccctctcgtttcgatcacacgtttataccaatgaaacgaaagtttcttcttacgttttaagttatcattatgatcgacaaaaataaagccatattgctttttatatccatttaaccaacttaaaagatcaatcactgaccatgcataataaccttttaagttaattccctcttcaattgcacgcttcattacttttaaatgcgcttcaataaatttaattctcggaacatctacaatttctccgtcaatgatcggatcttcatcaccaagtccattttccgttacatacatctttatgtcaccgtaacgtgctttcaacatatgcaatccctctaagaaaccttcgggagatatttcccatccccattttgtatatgttttatcatccattttaactgttcgataaaaaccatcaaaagaagagttacctggagcaagcgttgagttttctcgagaatgttcctcactctttatatccatatcgtatctttctactcgtattggttgataataattcaagccaataaaatcattttcttctgcattttgtttaatgatttctaattcttcaaccgtccaattaggagtccatcctttttcctttaattgttgtacaacataagacggatactcgccttttaaaattggatcataataccaatacgtttcatattcattcgcatgatttgctgcttgtatattttctttttgatcatccacactataagctggtaagaaaacatgtgtaatcccaatttcaccatattgtttcagctgcttgtacaccgcaactgttttcgcgtgtgcataaaatacataatgagtagcttgaaaatactttggaacatcattttgtattcctggtggatgtgcaccttttaaataacctaatccacaaaacattacggtctcattaaaagtaatccaatgcttaactctgtcaccaaatgccttaaaacaagtttctgcatattttacgaaagcctctgctgttcttttattcgtccatccaccatctttttctaacggtaatggtaaatcccaatgatataaagtgacaaacggcacaatcccgtattttaaacattcatcaattaagttgttataaaattcaatccctttttcatttacctttccatctccagtcggcaatattctcgcccaagaaatagaaaaacgatacgattctaatcccatctcagccattaagcgaacatcttccttatatcgatgataatgatcaacagctacatcaccatttgttccattgtatgttttgccaggaatttttgaaaactcgtcccaattcgtaacaccttttccatcttcattccatgcaccttctacttgataagaagctgaagcagctccgaataaaaaatcatgtggaaacttcatagtatatacctccatttcattacaacaaatcaaattcaatcatacatataaaatttataggtacaaattttatatgtatgattatatcttatgtttttatttttttctattataaaagtacaatttatattgttggttattggaaaagaaaaagaagcgatatattttatcgcttcttactctcatcatctttattcttttattaatgacttattcgctcttataacttcttgatacaataatggtgaccacttttcatttatgtagtcttgaattacccagcccactctcaaaggattcttttgttttatatagtttgcaatttcaggatttatataagaagcatagtaatatggactattccatgctgtaccaccagaagacaagcttgtaaaattaatatatagatgatttaaatcctcgctattgttcatcgtttcatccatcgtatctttaatagattttactttctcatcatagctcactttatatttatcttgtactgttacatttgcattttggtttacagttgtggtaaacgtctcattatctggccaataaaaattattatatcctccaggttcattactaccactatatctttttagtagtacaattttcccacgagcatctccaagctttatatttccttctgtttttaaaaaaataggatcaacaaaatattttttttcaaacgtgctactaaatgaatcttctgcccctttcatatcctcatactctttttttaaagacataataattgtttcactcgggttatcttttaaaaattgtttcgcttcatttatgaattcatgcagtgttacgtaaagatataatggcccatgatgaagaactatcgtattatcatctgttaaacgtcctcttatatcaaaaatgcgagctccatggtccatttgatagcgaaaatcatattcttgcgtcattccccatacttgcttaatcggattttgcaacttgaacgtcccactatcgtgtgttcctggaattgaaattcgtgctaacgggatattatcaggtataggttgcatccattttgacaaattttcaagctcattaacagagctagctgcaactactctcttatcatgtaaagcaaatacaaatgtgataaatattgtactacatatgaataatttcaaaattaacttcttattgctcattattatccctctctctttctgtttttatatcaaacttattgaatataatataagctagctcagaaaaaataaataacatttcatcaatatgaaatattgcatagaagtaaagttaaaaaatcattcacatatactaaattagaaaaatttaaaggaacttcatctgaagttccttttacttattttatgttcaatacgtatgaaccatttttattctcatatttatagacgtataaataatatttacctggctttgcattataagttcctttaactacattgccttcattttcaccatatgctacatagttatttaaatctgattcatgatgaagtacccatgtcattccaatattttgttcatttagtagagaaatattaatattttccggcgaatcaatttggaaagtaaatacatctactctatcactattatgtagcgttcctttcaccggtgtatgaaagttaactttatttgcctgtctaggctcattatttggttcattttctgttacttgtaattcattcccaccgtttggttttctttgttcatagcctaagtttgctagtatagacttcaaatctggtaaaacaccaattttatctgcatatggatctttagattttgttcctgtgctctggttacttaatattgctcttagttcacttggtctatatggttgtcctaaattttctttagcaatgctttgtactaaagtcgctgccccagcaataattggcgaagcactagatgttccgctaaagcttgaagtataaagatttacagcacttctactttgctcggctgtagttgtatctacattttctccccatccgtacacatcaatacggcttccataattcgaaaaccacatacgttcatgagggaaagatgaagagccagctcctaccataattgcacccgaatctttaaaatctttactattacgatttaagacttgcttaccttttctatctttgaactggtctaaatcattccacccatttgctccggcctctataattacaatccctttatctgtaccagcacgaattgcatcaaagatatctggttgtacttcaacaggtaaatatttatcaccatatccatcgaaagatgcttgtgcctctaacaataaaacatccccagcttctaactgatttacagcgcttaatattgcatcagccgtattatactgtccattatctcttatttgagagataacctttgctttcgcttttggcgcaatcccaatattcccaacttcattgtcctcagaggatacaattcctagtacagacgtcccatgaccgacatgctgatctatatttcttccagacattaactcaattttttgatgtaataaatcctcatgatttaataaccatccgtattccatatcaacaaaagtgataccatttccattaccgccttgaattccccaggcgaaaggcgcattaataccgtatggggccgcttcaagataaccttgttttttaaatctaggattgttactaggattaagagctacacttgatgattgcacttcaggtggcattattttctcttgtttcttcatatacgcatcttctattaaagaagatgcctttaacttatctactatttcttcttcatacccactattttgattttgcagaatatagtagtttaataaacttgtagatacatgattaggtgctttcacttcaaggttttgtatttgttccgggcttacagatgtgaataaacgagtaaatgttacatctggatattctgtcaaaagatcttttattactttatcattcgtttgagattgtatttgtttttcaataccatcttcatatggcaaatccaaatccgctttaaattttacaatgatttgcttatctgtttcttgttctatccctgatttaatctgctgttctatagaatcagcatgtacactattgatagtaccccctgttcctaaaagtgttgtaatgattacagttgacgcacacattttttgaaatatttccattgcattaatcctcctattaataattaatcattatattaatctataatgatttcgtttctataacgtattccctttctactaaatagattatagtaatcagaaatatgaacttcaatgtattttcatatgcaatatttcatattcggactctacactacacgaatatgaaacttatagtgattatttattttatatgtgctaatatacttacattaatatattacgcatatatacatttcaaactacattacttaatagtttcaccttaattttttcttaggaggatttacaatgaaattactaaaactaaaacatataatccctttatctgcagctgcaattacattcgtatgtagtcaaagcacagctgaagcttctaccattcatacagtaaaaaagaacgatacactttggggcattagtaaacaatacggagtttcaatacaatccattaaacaggctaataataaaggaaacgatcaaacctttattggcgaacagttacatattccagggtccgtgaaatcaaatgaaatcactgttcctcaaaacgccaagcctgcgaacatttctggacaaattatttatcaagtacaaccgggagattcattagaaacgatagcaaggcgttacaatgtcactgtccaatctataaaacaaattaacaatacaatcggaaacaagctttatacaggacaacatttaaaaatcaactcaagtatttcacaaaaagaaaaagacttaatggcacgcttagttaccgctgaagcaggtggcgaatcctataaaggaaaagtagcagtagcgaaagttatactaaatcgtgtaaatgcaaaaggttttccaaatacaataacaggcgttatttatgaacctattaaatacggatatgcatttactcctgttacagatggaagaattaatcagcctgcaagcgcagaagcaaaaatggctgtagaagaggctatctccacaaatggagtacattctgactggctttatttctacaatccaaaaacatcaacagacaagtggattacgacacgtcagacagtagcagtaattggtaatcatgtgtttgctaaataagatttaaaatcattaacagacctcttcacttaaaaggtctgttttttttctatgtaagatgttattaatcatatgacatagttattttttaaactatttcttctttcaaataaaaatttttgtatttactccgccactcgtagaaattaataaagcatcaagttcaaaaactcccactttattaataaaagctatttcttaacttcataaaattgttatacactagaaaaataaaaaacaaactattcgttagcaggtggaagaatatgtatgatgttacaattatcggcgctggagtaagtagcatttttatggcttattcactagctaaaagtaacaaaaaagttttaattcttgataaaggtaaagcgctagaagatcgccattgtcctttagacgaaggaaaagtgtgtaattgtactacatgtgataaatatttcgggtttggtggtttaggaaaatctgaagggaaatttaattatacaaacggatttggcggagaacttgagaaaaaagtcggtaaagagggttttatacaactcatggctgaagtagatgaaattctatgtcagtttggtggaagttcggtttcaaaatattctactgaaaattcaagtctcactaagagagctgaagcgtgtggtttacaaatgctaacaacagaagtaagacatcttggtactacactttccagtaacatttttcagcagctctatgaatttttactgacgaaaataaagatccaatttcatatagatgtacaacatattctgaaacaggaagatcattttacaatagagacaaatcaaggaacagttcaaactaagcaacttgtatttgcaactgggcgctctggggccgattggttaaaagaaatatgcagttccctaaatatttctcaggagcaaacacgtgtagatttaggaattagagtagaaatgaaagaacatcaattacgttctatattaaaagatacttttgaaacaaaactttcttatcaaggtgagcatttcacagcaactacttactgtatgaatccacaaggccgcatcattcgaaagtacgaagaaggtttagttatgcctgacggtcaaaattttcgggaacaaggaactggcacttctaacttaaatttcactttatttattcctcgctattttccaactctcaaagaagcaaatgcatacgcaagttcaattattgaaggcattaaccaaggacgagatcggattgttatacagcgcttagaggacttactaaagaaacaacctacggtggaaaacagcatggagcataatcgtatacagcctacactacagggggattatggagatttgaatcaagaaattcctcaatcatatattgaagggctaaaagaatttttattacgcttagaacaatttatacaggagcctatcgatcaacatactttactatatggaattgatggaaagttctatgctcctacgataaaaattaataatcattttgaaactagtatacatgggctatttttaattggagattgttcaggcgttacgcattcattatctcaagcagctgcaagtggtctgtatgttggaaagtacttatctgacatttaatttctatcattaaaatatcagtcaaatattttcaatttcaaaacactttacttatatatagtaaaagtatattaataagacccctatccttccctgctaatgattaaccgacaaaaaatcgggattttacaaaatacatatgtaatataactgtatatttaaaacgattggcattcaattctaataaattgaatgtcaacagttttaaaagtctctatccattttcacttttatttgttcgatattttgtaacatcatcatagtgtttaatatggtaggatgtctataagtcaatttcactacaactatgactttttctgcctgtttctcaaaaaagagttatatttatgctactacgctttaaaaatccccattgtatatatatgaatacttcaaattattccctttagaaaacaaagtctaaatggttcattacagtctaatagttataaaaacataatatataactttagttaaataaattatataaagaaggtgtaaaaatgaagaacaaaataaatttacaaatgcaaaatataagttttgttataataatggctttagcagtatggttaaaaacatatcttattacgcgattcagttttgatttaaaaatcgagtcttcaacgcaagagctcattttgtttattagccctctagccgcatcattagcatttgttggattagcattatttgcaactggtgaaaagcgaaattatatagcgctctgtattaatttcttattaacaatcgtgcttgttggaaatgtaatgttctatgatttttatagtgatttcgttacattaccagtacttggacaaacctcaaactttggccaattaggcggcagtattatagaaatattaaactacaaaattatactcgcattcgtagacattgttttcttctttattttattaaaaaagaaatcattggtctttaaaacagaacgtgtaactcattctacgcgcttgttatactttcttttaacgattggtgtattctttgcgaatctacatcttgcagaaaaagagcgccctgaattattaacaagatcattcgaccgagtcatgcttgtcaaaaatttaggcttatatactcaccaagtatatgacttaacactgcaagtaaaagctgggtcacaaaaagcacttgctgatagtagtaaattacaagaaactgaaaactacgtaaaagcaaatcaaagcgagccaaaccctaatatgtttggtgcagcgaaaggaaaaaacgtaattgtcgtcactcttgaatccttgcagaccttcttaataggcgcatcagtgaacgggcaagaagttacaccattcctaaatgaattcataaatgaaagttattactttgataactttttccatcaaactggtcaagggaaaacatccgattcagaatttctaatcgatacgtcgttgtatccattaaatcgaggagctgtattcttcacacacggtaacaatgattatactgcaactccagaaattttacgtcagcaaggttatttcacttctgtattccatgcgaataacgcaacattttggaatcgtaatatcatgtactctgctcttggttatgatcgttactataatgagcttgattacaaaattacaccagaaacaaatttaaattggggattaaaagatatcgaatactttgatcaatcagtagatatattaaaaactgttaatcaaccattctatgctcgtttccttactttaacaaaccattatccatttacgtatgatgaagatacaaaattcattgaaccatacaactctggtaatggcgtatttgatcgttacatcgtaacagcacgttacttagacgaatccattaaaaaatttattgaacgtctaaaggccgaggggctttacgataattctattattgtgttatacggtgatcattatggaatttccgaaaaacataatcgtgcaatggcacagtttttagaaaaagatcaaataacagaatttgatactttaaatttacaacgtacacctttatatattcatattcctggacaaacagaaggtcaaactatttcaaagcctacgggacaaatcgatatgaaacctacgattctaaatttattaggtgttgattctacgaatgatatccgttttggccatgatatgttttcagatgaatatactggctttgttgttttacgtgatggtagcttcgttacagataagtatgcatacaaaaacaacactttctacgaccgtataacaggtgaaattgtagatttaccaaaaaaagaagctcaagccctcattaaacgtgcacaaaatgaattacgaatgtctgacaaaattattgaaggcgatttattacgtttctcagaaagcaataaaattaaaactggcgaagtacaaactaaaattaaagaaacagaaaaataatctatatgaaaaaggagcaacttattacagttgctcccttttacttttattctacacttgtttctaaagctacatctgtataggtattatcatcacctatatttaaaattacttcacattgacgcaatctcaattcaaagagcatgatagaatcatgataaacttcaggatttgatttcattttatgtaacatctcttgtttttcttgtatttctaattgcgtattttctacagcttgctttaaggagttaaatggattcctaaagaatatatgaatatccctctcttgtgtgttttcaaacagctcaaattgcaagaaaaatttcttcataatagaagccgttacttcagtataatcttcattttctacatactgtttatatttgttatatagcatagatttatttttaggaagaactccaaataatttaccggcactttttagtaaaaattgtgctggcgtaaatcgacgtaaaatatttacttcatccatttgtattctagtcgtcatcctgtcagtatctctgcgccagtcatcaagcactttaaagtcacattctaactgtattttattttctccaaatagtgaattaagcccttcactaagttcttctaaatacgtttgactttgaagaagctcattattagaagttgcaatccaattttgcatagaaagagcaagattaggtaatacagtttgttctaaatatttatgcactctttcattcattgctttatttagttccgtatccatgtgcccgaaatcactttcttcactaattaaattagaacagctctttaatatcttcggaatattttcggtaagatcatttgtaatttcagtcttcattgaacgatatgattgtgtaatgaaatgaattttttccctttcaaatgcagtaaggttattaatgctaccgtttagtttcactagcatatcttcattccaattaatagcatccaccaggttattttctttctcaacacgtttatccaaaagatatgtaattgtttttcgaatgaaaaataataacttttcagtacgttctgcatcgatatttttatgattaaagttaaaatgaataaactcagttaaaccatttaattgttgactacttgtatataacgaggaataagggaaaattctcgcatacgggaaatatgtgtttattctcgttgccgtatcatgtaatacccttttcacttctgcttcactgtaaatgttatcgattttatttaataaaaaatgaatttgtaaatttggcgtatgttcttgaatacttaataaaatatcacgttctttatcagtaaaaggtgaatccgcattcaatacgaatagtaattcgtctacagaatttaaatattcgaatatttcatctctagtgtcgttatttctattaaagccaggtgtcactacaaatgtaagtttattttcatttaaaaatctgcatggtaatttaaattcaacacacgctctatctctatatgtttgatggtgctgagacatcatattatggtaatcagagacatcttccgttgttgtaattgctgagtctgttatagcgtttatttctatatgagcatcattttttaaaactactacatttgaaattgatttttctaatatattttctcctaatatagagttaataaatgtagtttttccgttccctgaagttcccgttactaaaatacgatttgttcttaaatctgcgagctcgtcaactaaccatttaaatcggtgacctatttctatattctgcttttgtgcccactgtgtaatagattcaaaaaggtgtaagctgtactctaagccatttacatgattaatagaatgtgacagtaagttttccgcatgttctatatttgctgaatctattttggaagggaaaatctcatcccatgccaatacagctgcagatggaaatacagcataagatggattgactacctttaaccagtttgctaacagatttggtatgatatcgtctaattgtctaagcgtatattgaccttgaattaatgtaaagtacgtttcttcgtaaagagcagaaactttgttccatatatcggacgaatgtatttcaatatgtaagaaaaattcatttattgtattaagccataataaataatttggttcatctttataactgttccaaagtgctgaaaccatttgtgtaaattgtacttgatctacattatttaatgtagctaatgcatcataaaaatagtctggtgaaatatgtttagtaaaccctttatcgatatatccttttaacacctcaaaccacggatacgactctattcgaattaactcattcacagcaagctctactgcactatcaaaatcttgctgttcctcataaaaggaacgggcaatttttgtgacgttcggataatcaggatttaaagaaactgcttctttaataacaccgaaagctgaatcaaaattattttgctcaatgtaaagagaaagtaattgtaatctaatttcggtcatcaatattttattatcagtagtaatggaagtataaatattttcagcatatggtaattgattaagttcgaaataagcatccgcaatatttttttgtgcccatggtgctaattcattactaaccttctcccatttaaaaatagctgcttcaaaatcttgatgacgataataaaattcaccttgtgcaaaacgaatataagacccatcagaaatctcatttttttcttcgtttacataagcttgtccaagtacgtcaagagttggttttgtttcattctccattaggaacgtttcataatacatcttttttattaattgtttttctaatctcatcttttcccccactatatcttgaaaataaatttttaagatatgtcaatgctttttgtatgtatgctttttatcttaacaaagaatatcttttggaaaatttcattttcctttcatttttcaagttagattgaatttttatgagaaaagtttcagttttttttcaattccctttcagttatgaaacagcattagatgttcctaataacctaataacactataatattccacattatattatcaggaaaaccccatataaaccatattataaaaacaatctataatgaatttatatgcacaattcactgtgctgttaaacaaaaaaataacaataggagccaacatctatcataccatttctttctcaaattgttttcctttaaaatgtttcattagttatgtaattaaattccattaacctatataaataactagtccaaaaaatatctatatgcatatcatgttatagtaaagaatttaggagatcctaaaaggaggcattttcatgtttgaagataaatctaaaataaattacccatatgaatttactgaaactacaacagttcctctaaagaaccccattgacaaaaaattcaagaacggcacaggtacacataacttcccaattaagaagcactataaagagcaagttctatacactgaaaaaattaataataataaaaataagtaattgtatagatccttatgacaattggctaaataagaagcaacatttggccatgcatagttatttagttagtaatgatacaattcatgcaccttttaaaaagtgctgtatacagcgcttttttatacatagataaatttaagttaacgcaaccaagaaatacactacaaaattactccaccatattctcgtttacaattaaatctacatattaaaagggagcaacagtaaatgttgctcccttttgaaatgtaatctattcactctacataaccctcttaaacatcttctccaactcataagtagaatgatgcacaagaattggtcttccgtgcgggcatgtgtacgggtttgttgttgtacgtagttcttccagtaaagcaaatatttgatcgttcgttaaatattgattcgctttaatagatgctttacagctcatcatgatggctgcttcttcacgtaactttttaatatcaactttttttagtttaacaacttgctccatcatttcatcgatgatttctgtttcttgtcctttcgggaaccatgttggatgcgagcggacgataaaggattgatggccgaattgttctaaaaatagcccgactttttttagttcttctaactgctcttcgacacgtaaaaattcagtaagagatagatcaatacggtacggtacaagtaactcttgtacttcttgcgctactcttcctactttatcacggaagtattcataattaatacgttcctgcgcggcatgctggtcaatcatatataatcctttatcattttgagcgaaaatatatgttccatgcatttgtccaattggataaagcggtggtaagtcattcccgttcatctcaatctcttttatttcccgaacttcttcttctaattcctctagttcaaagtcctcttcattactgtcccacgatttctcttcttgaattggctcttcgattatcggtttagtggatggttgccaactttgttcttctctcacgagcgactgtggtggttgccattcttgcttcggtggttgccaaagctgcgcaggctgtttcacagcctgcggttcttcttgttttgcatccatgccagtcggtaaaacgatgtccggcatagatggttctttcggcttcgcatgctcaaactggaactgttcttgcacactttcgtctttttcttttttcttcgttgttacacctgcatctggaataagctgtatttttttaaatgcagcttgcaatgtttcttcgatcagctttagcaattcttgttctttactaaaacgaacttctaatttcgctggatgtacgttaacgtcaactagcattggatccatttcaatcgataagaaaccaattggataccggccaactggcagtaatgtatggtatccttgctgaattgctttcattaatacaaagtttcgaacgtaacgaccatttacaatcgttgacatataattacgagatgctctcgttacttctggtaatgttacataacctttaattgtaaagtctaaagattcagcttcaattggaacaagcttcttcgcaacttgaatactgtaaatcgatgcaagtacttgtcttacatcaccgttacctgacgtatgaagcaatttcttttcattatgaaatagttttaacgatacttctggatgtgacattgcaatacgatacacgatatctgtaatatttccgagctctgtatgaatggttttcatatatttaagacgtgctggtgtattaaagaataaattttgtactgtaatatctgttccttttcggctcgcagtcttctcttgctttataatgtctccacctttaataataaggtgtgtaccaggcgcatcacctgtgctagtaattaattccaattcactaactgaggcaatacttggcaatgcctcaccgcggaaaccgagtgttcttatgcggaacagatcgttttcatctttaattttactcgttgcatggcgttcaaaagcgacgatacagtcttcttctgcaataccatcaccattatcaatgatacgaattttcgataacccagcttcttctaagtggatttcaatagatgtactattcgcatcgatagaattttccacaagttcttttacgactgaagcagggcgctctactacttcccctgccgcaattaagttagagagttggtcatcgagtttgcgaattttccccatctacttactcatcctttctttaactttttctgtaagcgatacaattcgttcatcgcttctaaaggtgtcatatcaagtaaatcgatttttttaatttgcgccagtactgctgtttctttttgatctagcagaggcttttcttgtttcttcgaagactgttctcctccaaagaaagatagttgcgattcttcttcagtctctactttcgtttcctgtatttctgctatttcttcttttacaactacaggttctggagtagcttcttgtactttcacttctactcgttttggaataataatttcttcctgtccttctagctgtgctaacacttctttcgcacgagcgattaggctatctggaagctccgcaagttgcgcaacgtgaattccgtaacttttatcagctgctccatcttgaattttatgaaggaatactacttttccattctcttcaattgctgaaacgtgtacatttttcagttgatttaaactctcttctaacaccgtcaattcgtgataatgcgtagagaataacgtttttgcaccaatttggtcatgaatatgttcaataatcgcttgtgcaagtgccataccatcatacgtagatgtaccgcgtccaatttcatcgaataaaattaaacttctttctgatgcgtttgcaattgcatttttcgcttctaacatttcgaccataaatgtactttgacctgaaattaaatcatccgctgcaccaattctcgtaaagatttggtcaaatacaggtaatactgcttctgttgctggtacgaaacaaccgatttgcgacataaccgttacaagtgctaattgtctcatatacgtacttttaccagacatgttcggccctgtaattaaaaagacatccatattctctggcataatacaatcattcggtacatacaatttcccgttcaatactttttcaacaacaggatgacgaccatctttaataaagatttcgcgcttcgttgtcagtacaggttttacaaactgttcttcttcactaactgtcgcaaaactttgcagtacgtctaattcactaattactttcgctaaatgttgtaatttcggaataaatacttttacttcttcacgaagtgctgtaaataaatcgtattctagctgtacaattttttcttcagcttctaagattaacgtttctttttctttcagttcatctgtaatgaaacgttcagcattagcaagcgtctgtttacgctcatagcgaccttctggaagtgctgcaagattcgctttcgttacttcaatgtagtaaccgaaaatacggttgtatccgatttttaacgatttaattccggtaatatcacgttctcttttttcaagctcagcaatccacgttttcccgtttttactaacgtaacgatattgatcaagcttgtcattataaccatctttaataatatctccatctttaatcgaaagcggtgggttttcttgaatacttcttcctagtaattctgttaagctttcacatggatctgcaccttgaattaatctcgatgcataagcgttatctaacaaactaattgcttctaaaatagctggtacttgaagcaatgaacgtcttaattgtaataagtctcttgcatttacgttaccaaatgcaacttttcctgctaagcgttctaaatcatatacttcttttaacttttcctttaaatcttcacgtaagaagtaatcatttacaaacgtttcaaccatttctaaacgctcttcaattctttctttctgtataagtggacgttccatccactgttttaacatacgaccacccatagctgttttcgtcttgtccaataaccataatagtgatcctgttttttctttcgttcgaagtgtttctgtcagttctaaatttcgctttgaatgtacatcaattttcataaattgattcgtataataaatttctactggttgcaaatgatctaaagaacgtttttgcgttcttattacatagttaaataaacgtccaactgctttaattaattttgcttgtgaaacatttttcacaagatgttctaatccttccggaattgccgttgcatcttcatacgaaatcgtcattttcaatgtttcagttaacttgtttagttcatctttagaaaatgaagaatcaacaacaatttctttcgaaccagttgcatacacttctaataaaatatcttctactgaaccagtcaataacgttactgtattttgtccagtcgttaagtcgttacaagctaatgcatatgatccatcttcaaaatgtgttaatgcggctaagaagttattttctttctcatcaattgtacgcccttccatcatcgttcctggcgtaattaattgtactacttcacgacgtactacacctttagctgttttcggatcttctacttgctcacaaacagctactttatatcctttttcaacaagttgttcaatatagtttttagccgcatgatacggtacaccgcacattggtatacgttcactactaccgccatctcggctcgttaatgtaatttcaagttcatgagctgcttttacagcatcctcaaagaacatttcataaaaatcgcctaagcgaaaaaataaaaaggcatcttgataatctgccttaacctttaaatattgctgtatcataggcgtatattgagtcatacttttcctccataattcttacatgataatctattttcatatatgtcgcatttcacggacactcttatctcctatttcaggagtctttcttcattataacatatttcataaagaatcatgttcattcagccccacttatgtaaagtaaaaagctaggaagaacttctccctagctttctattactcttcttctgcatcaactataaagttcggatctaattcttcaaattcatcatcagcaatttggaaatcatcatctgattctacgcagccttcaggatttacacttacacaaattttcgtttctccaactacttctgttacaaattcacgttctacagttacaacaattttattaccatttggtgatacaagtgcttctaaacaatttggcggctgaataacacgagcaataatttctaaatcgtcaccagaaaagtttttatcacgataaccaatacttacttcgtccgtgtagttcacacgttctgttacaacttcagtctttgtatttccatcaaatgaataccaagtgttcacatcatagaaaccttcaatttccacatgttttccattctttcttgcttcgtacgagtggttaattacccagcaccctaaaatacttgttggctcattattcgattcacatgtatgcgttgactttgtatacttacgtccttttccaaccactgcttttgtaataatctctctaaattcggacattcgtaaccctcctcaatcactattcacttaatcatatgcgtgacaatagcggaatgtgtcattctttttttgagaagaacttacgtttaatccacaaaaaaaaagagatgtcaatatgacatctctttaacaaccacaatttccttttttactttctaccgctgcgccagtttcaccctttagtacatcgccaccagttgaaattaatatttcatctgttacgttgttagaaattgtactagcaactaactgtaataagtcatttacgtatgtttgtgaagatttaaattgttgtacgactggaatactgtctaacttatcttgcaatgcatcaatttcagcttctaccttttttaaagcttcccatttcccgtaatgttgcaagtttactgcttgtttttgcagtgctttaatttcatcgattgcgcgctttacattttcatttttatgaatttgcgcctctgctttcttaaaaaaatcaacttcttctgtttcagaaatcatttttgctaattctttcgcttgttcaacaatgtcatctttcgaatatactttcatctattatttcacctcaatcggctcttcaactaattccccgttaagagaccaagtttttgcttccgttattttcactttcacaagctgaccaattaaagattttgaagcgacgaagtttacaagtttattcgtacgagtataacctgcaagtacttccggattatttttactttccccatcaactaacacttctacaatttgacctttgtaacgactattcttttcaattgccaacgtatttactagtgtatttaagcgctgaagacgttctttctttacttccatcggtacattatctttcatttttgcagctggtgtaccttcgcgaggagaataaataaatgtaaaggcagtatcaaaccctacttcacgatataacgacatcgtttcttcaaattgctcatctgtttcatttggaaaaccaacgataatatctgttgttaatactacatctggaattgcttctttaatttttcttacaagttctaaataatgctcacgcgaatatttacgtgccataattttcagcatatctgtacttccagattgaactggtaaatggatatgttctactaggttgccaccttttccaagcacttcaattaagtgatcatcgaaatcacgtggatggctcgttgtaaaacgaatacgggcaatatcaactttacgaagttcgtccattaaatcgccaagaccgtattctatatcttcaaagtctttaccatatgcatttacgttttgtccaagtaaagtaatttctttataaccatttgcagctaaatgacgaatctcttggataatatcttctggacgtctacttcgctcttttccgcgtgtatacggtacaatacaatacgtacagaatttatcacagccatacataatatttacccacgctttaatatcaccacgacgtactttcggaaggttttcaattacgtcaccttcttttgaccatacttcaactaccgtctctttcgagaacatcgcatcttttagaatatacggtaatctatgaatattatgcgttccaaataccatatctacatgctgatttttttgcataattttatttacaacagattcctcttgagacatacaaccacatacaccaattaaaaggtctggatttcttcgtttgagtgactttaaatggcctagctcaccaaacaccttattttcagcattttcacgaattgcacaagtgtttaataaaactacatctgcatcctcagttgaaaaagttggttcatatccaagtgctgtgaaaatacctgccattacttccgtatcatgctcattcatttgacaaccatatgtacgaatatagaactttcttcctgtaccaaaattgcgaaactcttcaggtaagccaaaatcccgttcaattttaacttcttctttcccacgctttttcgcatcctttaaggaaggtggttgatatacactttcaaagtatttactataatctttctcttcttttttcgtagaggaatttgcttgttgacttgctaatcgttgttgctcgttcatcggtaatctcctttcacccttaactatacacactctatagtccattttaatgcgcttagactcacctcaaaaatggttagatagcttgagagataacttgtcctttgaaacttgagtaatcaatctaatcattcataagaatgaagtcttccccacgcaaatagacattccctttttatcatttcttgttgtcctacccaaaagcatattgctttatccctataaacattaccatagtacgacgtgtttcgccaattttaacaataaagaggccctttattatcttacatttcataagcaatgaacttgccattttcatacaacgatttatatattattttatcattctgaattttccaagtaaataagactaccctatatttttgtatataaaaaaaggttgccaaatcggcaacctcctcttcttacattacataaattcagcaacaagctcatcaaacattttctgatccatatttaaatcagatttcactaaaggctcttcactatagcctttaacaagttcttgatatgatggttgcttagtattttgataaattaaccctgttactaaaccgttattttccattaaagtttgcatagccatcatgcgattagatggatcatatccctctactgtgcttagtttcgttaagttctctttaaaccaatcgtaagtatttactttattgtaagtaacacatgggctaaatacgttaattaatgaaaatcctttatggttaataccagcctcaataatttgtgttaattcttttaaatcactcgaaaagctttgcgccacaaatgtcgcaccagctgtcaaggccatttccattacatttagtgatggttcaattgaaccttgtggtgtgcttttcgttttaaatccagcttcactacgtggtgaagtttgcccttttgttaatccataaatttggttatccattacgatgtacgtaatgtcgatattacgacgaatagaatggattgtatgacccataccaatcgcaaatccatcaccgtcaccacctgaagcgataactgttaaatcacgatttgccatcttcacaccttgtgcaattggaagggcacgaccatgaatactatgcacaccatatgaattaatataacctgaaatacggcctgaacagccgataccagaaataacagcaagttcatctggatttaggccaacgttagctgccgcacgttgaattgcagcttgcactgagaagtctccgcaacctgggcaccagtttggctttacactgttacgaaagtccttaaatgttgccatttaatacaaccccttttttgcattcgttgtaaatctctttcggcaagaatgggtttccatcatattttaaaagactagaaattttctcaccattaccaagattcattttcataatgttagcaagctgacctgttgcattgttttctactactacaacacgcttcgcctttttcacaagtggatcgatttcagctgttgggaacgggtgaattaaacgcacatgagcatggtttactttcataccctcttgttctaaacgcgtcattgcctcttcgatcgcaccacgagttgagttaaatccaacaagcaatacgtctgcttcttcatgcttaacatttttataaacaggggtattaaacttcaagttctccattttacggaaacgtttgtccatttgatctttacggtttattgctgattccgatggttttccagtttcatcatgttctacacctgtaacatggtgaacaccatttttcataccaggtaaaacacgaggtgaaacgccgtcttctgttacttcataacgcttgaagtatgctttattttcacgttctggtaattctgcttctaaatcaagcttaccacgacgaatttctactttatctaatttaagtggttctactgtttgttttcctaacgaaagctgtaaatctgttaagaaaataacaggaacttgatattcttcagataagttaaatgcttctacaatgtcatagaaagcttcttcaactgtacttggcgccattacgatttttggaatttcaccatgcgtaccgtaaatcatcgccattaagtcagactgttcttgtttcgttggtaatcctgtacttgggccgccacgttgtgtatcaacaattactaatggggtttctgtaatacctgctaaaccgattgcttccatcattaatgaaagacctggaccagcagatgccgttaatgtacgaacaccagcatagtttgcaccgattgccattgtacaagctgcgatttcatcctcagtttggattactgttccgccgactttcggtaattttttaattaagtattccataatttctgatgcaggtgtgattgggtatgctgacataaaacgagcaccaccagctaccgcaccaaatgcgattgcatcgtttccaatcataaacatgcgttttttaccatcagctttttcaagctgcatcatgtttactttctcacctagtaattctttcatatattgagagccgcgtttaattgcgtccatattcttttgaacgacttgctctcctttacgaccaaagatttcttcaacaacatctaaataagctgtttcatctaatcctaatactgcacttgatgctccaacagcaaccatgtttttcattaatgatgtgcctaattctgaagcaatatctgtaaacggtatcacatatagatttacatctgtattgtcaggtattgttggattaaatttcgcatccgcaactacaattccacctggacgtagttcgtggaaattaaaatcgattgtttcttggtcaaaagcaattaaaatatctaaatcatctgagatcgctcgtacttctgttgtacttacacgaattttattatttgtatggccgccttttatacgtgatgagaagtggcggtaaccgtataggtaatatcctaatcggtttaatgcaatacagaagatttctcctgtactttcaattccttcaccttgttggcctccaactttccatgaaagttgactaatcatctcctacaccccttttggctgcattcattgtagtgtatttttttacagtaatagtttagcattttttatgcaaataaactacaacggacgcaaattatgcctcttctgatttccctgaatctttagtataaagctattttgtttttcattctagtattaggtcttaaaaaaagcaataaaatcaaatgaattaattttaatttttctgaattttaaatcagaatttaaaaactcatatgttctacaaaattatcatataaaaatcgttctacagtagatgcagcatagtgtttacaaagctcattcattacattttcataatctcgatacgctgatacatttacaactgtatctacaatcccatcaaaatctgaaccaaaccctatattgttttctccacctagcaagcaaatatattcgatatgttttattatatctgctacattcgcttgtttttcatttgttagaaactgcggtacaaaagtgacaccaatcatgccatttcgctttataagagctttaagttgttcatcgtttaaattacgtgggtgctcgcaaagtttcatacaatttgagtgggaagcaataggattttttgcaatctctataacatcccaaaaacttctttcattcaaatgagacacatcagtccatacatgtaacgtattcagttcttgtacaacatgtttaccaaaagtcgttaaacccgccccacgtgtctctagcgcaccatcagctaagagattggcataattccatgttagtccaaaagaacgtactcctaggcgatacaacaaccgtaatttcattgcatcttttccaattgtttcgcatccttctattgttaatatcgctccaatctcgtcctgttttaatatgttaatatcatcttttgtctgaataaacttcacaccttgtagggataaaatttcattataaaaaatatctaccatttgtaatgctacttcaaatcggttttcatatgccactgtttctggtacatatatagcaaaacattgtatacttccttttcttctctttaactgttcaaatgtaatatgtaattgtgaatcatctttaaaattccttttcccttgtgcactccataactgaagaagcacgtcacaatgagcatcaaaaattttcattttcattcctccattataaaaacaacctgtttgcatactgcaaacaggttgtttaaacttaacgaggttctacaattaattttattgctgtacgctcttcgccatcaatcataatatctgtaaacgctgggatacaaatcaggtccaaaccactaggcgctacaaatcctcttgcgattgctactgcctttacagcttggttcaatgcaccagcaccaatagcttgaatttctgctgttccgcgttcgcgaataacacctgcaagtgcaccagctacagaattagggaccgacgttgctttaacttttaatatttccattccgcgtttcctcctcgtttctttaaaaagtattagcaattatttcactttaacttatattcacgaggaatggcgcgtattcctgctaaattttcgtaatttttctaaaaaattaaaatataataacttatctaaaatttgacggaaatttactcaaaaaatggttgatcgtcattaattaaaatacgttcaattctctttgcttttcctgtatttggatccacatcaattaacactgcacttaattgcgttctgccatttgttacttcaaatcgtactggtaagtttgttaaaaacttcttcaatactgcttctctgtccatacctaatattccgtcatacggccctgtcatcccaacatctgtaatgtatgccgttccgcttggtaaaatacggttatccgctgtagggacatgcgtatgcgtacctactactgctgtagcacgtccatctacataccaacctagcgcttgtttttcacttgtagtctccgcatggaaatcaacaaatataatattcgtacgttttttcgcaatattaattaattcatccactttacggaatggacaatcaattggaggaaggaaagtacgtccttgtaaattaataactgcaacttctgttccattacagttcacaaagataagtccttttcctggagttccttctgggaagttagctggtcttgcaagatattttgcatcatcgatgaattcaaatacttcacgattatcccaagcgtggtttccaagtgtaactgcctgcgccccacactctaaaaagtttcgatatattttttctgtaatcccacggccacctgctgcattttctccattaatgattgttactgtaggtgtatattttttctttaatgccggtacgtattgttgaatcatacctctaccaggagatcctactacatccccaacaaataatattctcatatgtcttaccctttctatgtactgcattttttattgctatagcatcaagtaaattccttataatatctttattataagtttgcttcacttttatgctatataactaactgtctttattttatccaattccaacacaaaaaaataaagtggtgtttcaccactttattttgcgtattccactgcacgtgtttcacgaataacagttactttaatatgtcctgggtaatccagttcattttcaatacgttttcggatatcacgagctaaacgatgagcttctaagtcatcgattgtatctggttttaccaaaatacgaacttcacgtcctgcttgaattgcaaatgatttttcaacgccttcataagactctgaaatctcttctaacttttcaagacgacgaatatagttttcaagtgtttcactacgagctcccggtcttgcagctgataaagcatctgctgctgcaactaaaactgcaatgatagaagttggttctgtgtcaccatggtgagatgcgatactgtttataactacaggatgctctttatatttcgttgcaagttcaacaccaatttcaacgtggcttccttctacttcatggtcaatcgcttttccgatatcatgtaatagacctgcacgtcttgctagtttttcatcctcgccaagctctgccgccataagtccagttaaatatgcaacttccatagagtgttttaagacgttttgaccataacttgtacggtattttaaacgacctaaaattttaattaaatctggatgtaatccatgaacacccacttcaaacgttgtttgctctcctacttcgcgaatatactcgtccacttcacgtcttgatttttcgaccatctcttcaatacgcgctgggtgaatacgtccgtcctgtactagtttatcaagagcgatacgagctgtttcacgacgaattgggtcgaatccagaaaggattaccgcctctggtgtatcatcgataattaagtcaatacccgttaacgtttctaacgtacgaatattacgaccttcacgcccgataatacgtcccttcatttcgtcatttggaagatttacaaccgaaacggttgtttcagcaacatgatcagctgcacatctttgcattgcaagagataaaatctcttttgctttcttatccgcttcttctttcgcgcgaacttcactttcttttaccataacagcgatttcatgagaaacttcattttctactttaccaagaataattgctttcgcttgttcgcgtgtcagattggaaatgcgctctaattccgtttgttgcttttgaactaactctcccactttgctttccaactcttcaatctgttgttgtctcgctacaagagaatcctctttcttctctaactgctgctcgcgtttatcgagcgtttcgtctttacgatcaaggttctcttctttttgcattaaacgattttcttgtttttgtaattcgcttctacggtcacgaatttctaattcagcttctgtacgaagtgtatgaatttcatcctttgcttctaaaagcgcttctttcttaagtgcttcagcctcacgattcgcttcgtctagaatacgtttcgcttcattagccgcaccattaatcttcgcttcagcaatagactttcgaacaaaaaagccaacaactgcaccgactgttgttgcaagcaaaatggagatgagtatccaaactgtactactcatgatttcacctccccttgctatgaatgaaaaaagactgtcggcatgtacattgaattacaacatacagcaaagaccgtcgtcccgctttttttaagggactttcttcatttcacaattaaaatgtcatattattatttcggtaagatttaaaccttactccgaatattacttctcttcttgagaagagtatatcgtatataagaaaaaatatacattctcattgtatctatcgtaattttcattgtcaagcgttgtctacttttactttctttaccttcagccttgaatgtgacctaaatttaaaaagtaaggagcctattatactggaaaaccttagtaattcccatttctttacttaaaatatttaaatatccttctttacacaacccatttgaagtcaaaaaatatttttatctatagtattacgctccttaatagtagataaaaaaataaaagacacgagaccgtgtcttttatttttttaatcaagaagagttgaatcttctgcgccctcagcaccagaatcttcactaattccgtgatgctcacgaataaagaaggcaatttcttctcttaaatctgtattttcttttaagaactgcttcgaattttcacgaccttgtcctaggcgttcttcattataagaataccaggcaccgctcttttgaacaatatcaagctcagaagccatatccaagatttcaccttctcttgaaataccttctccgtacataatatcaacttccgcaacacggaatggtggtgctactttatttttcactacttttacttttgttttattaccaacaatgtcgttaccttgctttaattgctccgcacgacgcacttcaagacgaacagttgaatagaatttcaacgcacgaccacctggagttgtttctgggtttccgaacataaccccaactttttcacgaatttggttaataaagattgcaattgtttttgatttgttgattgctcctgaaagcttacgaagtgcttgtgacattaaacgtgcttgtaaacctacgtgtgagtcacccatatcgccttcaatctctgctttcggtacaagagctgctacagagtcaattacgataatgtcaaccgcaccacttcgtacaagtgcttccgcgatttccaatccttgctcccctgtatcaggctgtgataatagtaattcatctatgttaacgcctaatttttgtgcatatacaggatccattgcgtgctccgcatcaatgaatgctgcttgtccaccttgacgttgtacttctgcaattgcatgtaatgaaactgtcgttttacctgaactttcaggtccgtaaatttcgataatacggccacgtggatatccgcctactcctagtgccacatcaagtgctaaagaaccactagaaaccgtagaaactctacgctccgcttgttctcctaatttcataattgaacctttaccgaattgcttctctatttgttttaacgccatatctaacgctgcttgacgatcactcattcaaaattcctccttaactgaattgctaatcttattatacctattttcaattcaatttgccaacaaaaatcgaacatttattcgatttttttattttctatcaaataatatctaaatttaaccgtaaaaaaaactagaagaaacttatatctcttctagctttttatataaatgataaaatccatattttgctgttcgttctctaatttgttgacgacttccgcttaaattaagaggaaagactacagttggttcatccttaatcgaaagcccaacaaatactgttcctggttctttctgttctgaagcatctggccctgctaccccagtgaaactaattccgatatccgcttttaatacatccttaacattttcagcaagataacgagcacattctttactaactgcaccatcagtatgcaacacttcttcaggcacacgtaaaacatgttgcttcacatcattatgataacaaatgacaccgcctttaaatacagaagaaacaccagcgttttcagttacttgatttccaaaaagaccacctgttaaactttctgcacacgctaaagttaacccttttctcttcaataactcgattgccttataatgcaaaaattcttggtcatatccgtagaaaaattctcctactctttctaaaatcaaatcttccacatgttgaattaatttctccgcttcgctaacattttgatgcttagcggttaaacgtaatgtcacttctccatcatttgctaacggggcgattgttgggtttgtttgtccatcaattaaatcttgcactttcacctctaattgggactccccaataccgaagaaacgaagcacacgagaataaatgttttctcctgttgtaaaattacgtaaaaaaggctctacgtaacttacatacattggtttcatttcttttggcggccctggtaataaaatataaacttttccgttcttatttacccccataccaggcgccataccgtggtcatttgcaaatactgttgctccatttaaaacgagcgcttgctttttattattctccgtaaattcacggcctgtacgcttaaagtaattacttattaaggctaatgccttttcatcatacacaagctcttcatctaaactagcagctatcgtttctttcgttaaatcatcttttgttggtcctaatccacctgtaaaaataagtatatcagcacgttcttccgcagcttcaatcgccttttgcaatcgcttattattatcaccaacaacagtatgatagtacacgttaattccgattgaagctaacttttcagataaaaactgggcatttgtatttgcaatttgtccaagtaataattcagttccaaccgcaataatctcagcattcatcccaattcccccataaacttctattttgagtttacaaaagcagctctatttttccagaaataatcccatcctgaaataacagtaaagattaatgcaatccatatgaagatatctgcaactggaatatggattaaatttaaaggtacatcgtgtaataaatatgctgcaattgcaataatttgtgtccacgtcttaatttttcctagctggtttgctgcaactacttcccctgttccagcaagtacaagacgtaaacctgttaccgcaaactcacgactgataattacaataacaatccaagccggtacatattgcatctctaccaatgtaataagtgctgccgaaacaagcaatttatcagctaacgggtcaagaaacttccctaaattcgttacaagattatactttcttgcgtaatgtccatcaatccaatctgtagctgaagcaatgataaagataagtgcccccactaaatgttgaattggcaaatcaacatcaccaattttgtatgaaccccaatcaaagggcgctaacataattaccataaaaattggaattaagaagattctagatattgtaattttatttggtaaattcacagctattcctccatcatatcaaaaacatttgttcatcgaaaaaaagtcatcgaagcgatgactgttattgtgctggttgctctatcccttggtttttaatcaccaatctttggtgatattctttttgtggatctaacgggaaagcaagcacttggccattcagtttaatttcaacattcggtgcacttccaatattaagtcgtacttcttttaatgttgatacatcgcgtttctctgtttgaccgctttgtactgtagtgtttagaatttcgttacccgcatcatccttaacatctacataacttgtacccttagctgaaatttccagttctaatgttttattattatgaatttccaaagtagatacctttccagttgttccaactactttcacttcttgctgtccagttggttgtgctggttgctcctctttctttggttcttctttctttggttcctctttttttggctcttccgctttcacttcatctttcttcgtatctaacggagaatctttcgctttttgaacttcaattttctcactttgagcgcttggaactttttcatcatcttttccagttaacgcttgaaacacaaaccagattaccactccaactgcgatgactaacagcgcaactaagattttcggcatgtgatctgcaattggccatgatgaagatttttgcattgtttcttgtgttttttgtcccgttgatacttgtggaacttcacgcttttcagattgtggtatcgtactctgatgttctacaagcagttcctctccatttaatccaaccgcatctgcgtattgtttaatgaatgcacgcgcataaaaagctcctggcaatacatcataattgccttcttcaattgccactaaatggcgtttttgaatttttgtaatctcatgcagctgatcaatagacaagcctttcgcttctcttgtttctttcagcttttgtcccaattccgtcactactaacacctcaatatttctttaaaagtcaaacatagagaaattattttgcgtaccttgctcaatttcatctactaaattatattgtatttcttcatcataatcgttacgcaactcgataatataatcaaaatcatccaatgtgtattctgactgactcacaaatacatcaggatgttccacaactttcgttgcaggcaatctcataatttcacgaacgagctgccaatgtctttcgttagcacgcttcgttgacacaattccatctaggatgaaaatattgtcatcgctatactcatcttcaattaattgactgcgaacagtttgcttaataagagtagatgatacaaataaccaccttttatttgcacaaacacttgcagcaacaatggattctgtttttccgacacgaggcattccgcgtatcccaattagtttatggccttcttttttcatgatttctgccataaagtctacaagtaagcctaattcatcacgcacaaatcgaaatgttttcttatcatctgcatctcgttgtatgtacctaccatgcctaaccgctagcttatctcttagcttgggcggacgatatttcgttaccgttatgttatccatcgtatttaaaattgattcaagtctagagatttgctcttgattatcacacataagaagtaacccacgtcgtgcattatctacaccattaattgtgacaatattaatgccgagcataccgattaacgaagaaacgtcaccaagcaagccaggtcggtttttatgtatttcatattcaaaataccattcaatcatccaagatcactccccttgcttactttacacctacgtactatattatatgatttcaccctaatagggaagctaaatgtataatctatcctgtgtaattattatacaaaaaaagtagagaggagaatctcctctctacttttacttatgttgtacgaacttaaccattaaatttgcaattgtatgttgctcctgttcatcagcaactttccaaagctcagctaataatttctcttggtcattgcgtccttctacttcattagcaagatagtcgccaactcgaaatgccatatctgataccgcaccgccatctaaacctttgtcttgcgcttgctctaaacgttctcctaaaaagctcttccactgatcaaaattatctaatactgacataattaagcacctcactattgagtaataaaatcatccttaatttgtgcaactattcattttttatgtaagaattttttagcagtgccaaccgccattcactccgataatttgtccagttatgtaagacgctcctggtgatacgagaaatgaaactgttttcgctacttcttctggtaatcctattctacctaatggtatatcttcagcaattcccattttatcttcttcagaaaaaacacttaacatttccgtttcaattgctcctggtgctactgcattcacacgtaatccacttaaagaaacttctttcgctaaagctttcacatatgaattttgcgccccttttaccattgaataaagtacttcacaagaagcccctatttgtccccatatagatgaaacaattacaatattaccacttcttctcccgatcataggcggaagtgccatagaaagtaatttatatacgttcttcacttgaagttctaccatataatccaattcatcgtttgttacatctgttactagtccaaaaatactcttcccagctgcgtatacaataacatcaataggatgttcaatttgtccccacaatcgttctgctccatcactagaagctaaattagcttgaacagggataacttctccccatgccttctgcaattccaataccttttcttcactgttattgtaatgaacataaactgtatatccatcttgaattaattgtttcgaaatagcagagccaatccctccgctccctccagttactaacgcatactttttcataaattccctctcttatctctacaagttcaattttcacacaactaaataataccctcatcttacaatttttcaatgataagatgagggtatctttaaaattttattttttcggtaacacctgacaaacactcattttttcttctgataacaataatcccgctacttcttgtaagtcttgaacggttagtccttctaatacagtcaatgcatcaaataggctagattcattaaacgcgtatcgtgtaaattgatttgcaatatattctggtgaatttaacgagcgtaaaaaaccaccaattttctttttcttcactcgttctaatgccgccgcatctaattgatcataatctgtttttaataaaatatcttttaaacgatctgccaatgcatcaggttgtttcgtatcaccaccaaccattgcaaaaccgaagttattttcttctgtatagtcatacgagaatgaatcatcaataagtccttcattatataaagcttcgtaatgaacagaactttttccaaataaataatctaaaagtaacgtaagcgcaatttcttgttttaaaagcgcttgccccttttcttttaaattagtcgctttaataccaactaaacatttcggtgtttgcacaggcattgaaataatttttttcttttcatttacctcatttggttcttcttcaaatgaacgcacaatttctggctggtttttataatcttttttcgcttgattttcacgtactaaatccattgttttctctggatcaattgcacccacaacaaataataacatattgctcggatgataaaatgtttcataacattcatataataaatctttcgtaattttactaatagattcgattgtccccgcaatatcaattttaattgggtgttttacaaataagctatcaattaacccaaagtacaaacgccaatctgggttatcttgatacatttgaatttcttgcccaataatccccttctctttttcaaccgttttttcagagaaatagggctcttgtacgaagtttagcaatgtatttaaattttgttctacgtttgaagtacctgaaaaaaggtaagctgttcgtgtgaaggatgtaaaagcatttgccgatgctccttgtttactaaacaattggaaagcatcatgatcttctttttcaaataatttatgctcaagaaaatgtgcaatcccatctggcacacgaatcatttcttctttccctaatggtacaaatgtattatctacagaaccatatttcgtcgtaaacgttgcaaatgttttattaaatccttgtttcggtaaaacatatacatctaatccattaggaagtttttcataatagagtgtttcttttaattgctcataaacaattttctccacttactctccctccgttccttgtaaaaagtaaattgtatctagttcaatatttttagcaacttttacaatttcttcttttgtcacactttctatacctgtaagccattcttcaactggacgtgtacgatctgaaataataccatgatatagcatttctacaaagccacgtggtgtatcaattgcctctaatatttgattttggatgacactttttgtttgatgtatttcttcttcagaaaactctccgttttgcatcgcaagcatttgttctttaataatctcaactgctttttcataatttttcgcttcaattcctgacataacaaataataaacctttatgactttcaaagcgcgatgctgcatagtacgctaaactatttttttcacgcacatttacgaataacttcgaatgagaaaagccaccaaacaatccattgaacaattgcaatgcaaaataatcttcatctttatatgtgacaaatgtacgataaccgatgtgtaatttactttgttttaattcttgtttttcaacaacttctttttcttcattatttcgtctatgaaggagtacatttctttctctcactggacgagctgaaatagaaaaatacttacttacaagatcaacggcgttttctgaaatatcaccaataatatatagatccatttcatcttccgctaacaccttttgataatattgatacagactttcatttgtaatagacataacactctctttttttccatttgcacttaaacgatacggttctactttgcacatttcttcaattaaacgctcgtttgcataacgcattttatcgtcataagtggcttcaattctctgtaacagtgctcttttttcactttctacgatagaagataggaaaccgttgccctccgttgctggatgtaacacaatatctgacaacatagaaagcgctttttcaaataacggtggtgcatcatgtaagtaaacttcatttgcaatgtctacataaatggagataatatggtcttccccttttttacttacatctaccgctaaagaagatccgtataattcttctaaatattgacgaagacgaattacagaaggtaatttttctgtcgcactttgcaatacgtatggcaataaggcacgctctgtcaccgtctcctcatttaaaggcgctttaaaacgaaatacaaaggtattcgttttatatttatcagtcggaataatatgtacgcgcaaaccatctaactcatgtagttgttgttccattagtttcatttatagccctcctttacgtatataggaatattcctcttcaatatacagtttttagaaataaaaaatcaacttttctcccttattatgcttacatatgattctttctaaaaactttaatatgtaaggaacatagtaaaattccgtattaaatatattctatgtaaaaaagcccacactaatgtgcgagcttttttatacttataaaatacttatcgttttcctttttcataaggagttcctaatgctttcggagcttcagaacgacctacaaaaccaacaagcgctaatattgtgaatacatatggtaatatcgttaataaaacacttggaatttgatctaatacaggaattgttccgcccgttacacttagagattgcgcaaaaccaaagaatagagctgcacctaatgcgcctagtggattccacttcccaaaaatcatagcagctaaagctaagaaaccttgtcctgtaatagttgcccctgagaagttattagaaattgacattgcaaaaatcgctccaccgattccagcaaacactcctgaaatacagactccaatataacgcattttatatacattaatccccatcgtatccgctgccattgggtgttcaccaacagcacgtagacgaagaccgaacggtgttttataaataacataccaaacaacgaatgctaaaataatggcaatatacgacgttattggtacgttcgagaaaaatattttccctaaaaccggaatatccgaaaggcctggaatatcaatcttttcaatacgatactgaataaagtcagtctgccctttatcaaaaatcttcttaattgcaaatactgttaaaccaagagataagaagttaatggctacaccacttacaacttgatctgctcggaatgtaatagaagctaccgcatgaagtaatgcaaataacccactaccaattgccgcaaataataacgcaatccatggagtcatcgttccccaagtatcacccattaataagtttgtaacaactccaataaatgcaccaaatagcattagtccttctaatccgatatttacaacacccgatcgttcactaaatacaccacctagtgctgtgaaaatgataggtgccgatgtatataacgtacccgtcacaagaatggctaatatatctaaaaagctcatttatttcccctccttgctcatgcgtgtaagcgcccatcttaacacataactacatgcaacaaagaagatgatacatgcaataattacattaataagctctgacggtacatctgcctcaaagttcatttgaggggaagcacttttcaaaccaccaaataataaagctgaaaggattataccaaacggattattccctccaagtaatgctacggcaatcccatcaaatcctactcctgtaaacgaagacatcgctgtcatactctggaatgtccctaatccttccatcgctccaccaatccccgcaaatgcaccagcaattgtcatagagaatactacattacgagaaactttcatacctgcatattgagaagcatgctgattaaatcctacagactttaattcgtaacctaaagttgttcgatctaataagaaccacattaaaatagcgattaaaattgctacaataattccccagtgtagacgtgaaccgtcagtaatagaagcaagccagtctgaagatagtgacgcactctctttaatatcatacgttttgtcattacccgcatgtaagaaacgcttaatgatgtcatacgttacatacaacgcaatatagttcatcataatagttacaataacttcattcacttgaaacttcccttttaaatatcccggaatgaagccccaaattccgcccaccaatgcggcaaataaaatcgataatggaatatgaaggaacgctggtagtgagactgcataaccgaaccaaaccgctgcaagccaaccaactaacaattgaccctctaccccgatattaaataaacctgtacgaaatgcaaacgcgaccgataagccagcaagaataagcggtatcattgtacggagcgtttcaccaatcgcacttgcgctgccgaacattcctgtccaaagtgcactataaccaacaattggatcatagccactaactagcattacaatcgctcctacaagtaagccgaaaataacggatagtactgggactaaaatatttatcgttcgttctgttaaaagttttttagccatttgtacccacctgctccttctttgttcctccagccattaacaatccaagctgttgttcattcgtttctttcgcatcaactattgctacaatttccccttcataaataacagcaattcgatcgctaacatttaagatttcatctaactctaatgataaaagtaatacaccttttcctttatccctttgctctattaatctcttatgaataaattcaattgctcctacatctaaaccacgtgttggctgtgccgcaattaataaatctggatttcggtctacttcacgtgcaataattgctttttgttgattccccccagatagagcgcgtgctaacgtttgctcactaggtgtacgtacatcaaactgttcaataagagcctttgctttttctgtaattttgctaaaatttaaaatccctttctttgaaaacggatttttatagtacgtttgaagaactatattatctctaacagaaaaatcaagaacgagtccgtgtttatgacgatcttctggaatatgaccaattccttcttctgttattcttctaacaggccaatttgttatttcttttcctttaattgcaatagaacctgactcaacttttcgtaaaccagtaatcgcttctattaattcactttgtccgtttccatcaatccctgcaatcccaacaatttcccccgcacgaacagttaagtcaaggccttttacagcaggtagttgacgtgcatcgtgaacaacaaggtttgcaattgaaagtacatcttcttttggcttcgcgtctattttttctgttttaaaattcacttgacgtccgaccattaattctgcaagtttattttcatccgtatttgcaacgtcaaccgttccaatcccttttcctttacgaataatcgtacaacgatcgcaaacttccataatttctttcaacttatgtgtaataagaacaatagattttccttcttgtacaagctttttcataatttgaattagctcatgaatttcttgtggtgttaacacagctgtcggttcatcaaatattaaaatttctgcaccgcggtaaagagttttcaaaatctccacacgctgttgcataccaactgaaatatcctgtattttcgcatatggatctacagccaaaccgtattgttcagacagtttttgaatttctttagcagcatcctcaacagcaattttcccttttttcttcggttcatttccgagaataatattctctgtaactgtaaaattatgaacaagcataaagtgttgatggaccattccaataccaaggtcatttgctatattcggatttgtaatttttacaggtttacctttaattttaatttcaccctgctctggttggtacaaaccaaatagtacattcatcaatgtggatttccctgcaccattttctccaagtaaagcatgtatctcaccctgctttacttgcagcgtaatatcatcattcgctacaatgcctgggaatactttcgtaatgttattcatctcaattacgtattccattgtgttcctccttttaacagggaacattccctattacactattaacttattaagcaattcggaagttttatacatacaaaggttagttctatgaactaacctttgctatttctctatttatttttttagagaagcttcgtattctttatactctttatctgtagctggcactttaatttcaccggctgtaattttcttttcaagctcttctacttttgttaaaatttcagggttaacttttttcacgttatcagttgtttttgaaataccaataccgtcatcttttaagccaaactcttcaattttcccaccttttaaattcccatcttttgcttctttagctactttttctactgctacatcaacacgtttaatcattgaagttaatgttacattttcaggcataccttcttgatgttggtcacggtcaacaccgattacccaaacattttcaccttttttcttacggtttttcgcttctgtgaacacaccgttacctgtaccaccagcagcatgataaattacgtctacgccttgaccatacattgctgaagcaagaactgtacctttttcaggcttatcgaatgcttctgcatattcagatacgatttcaatgtttggatttactgcctttgcaccagctttaaatccattttcaaatttactaattaaatcacttttcattccaccaacaaatcctactttattcgattttgttgacatagctgctaccgcacctacaaggaatgatccttcatgatctttaaacgtaatgctcgttacgttcggtgcatctacaacagtatctacgattgcaaattgttgttttgacgattcttttgctacttctttaattgcaccctctaatttataaccaattccgaatgttaaatcatatttatctttcgagaatttttttaaattcggaatataatcagcctctttttcagactgaaggtaacgataatttgtcttttcttttaaaccattatctttaccaaacttttgtaacccttcccaagaagattggttgaatgacttatcatcaacgcccccaacatccgttacaagaccaaccttgaagtctttattgtctttcgtgtctttcttgtcactgctcgccttatccgagttaccacatgcacctaaaactgtacttgctgctaatgttaatgataataaaaggcctgcttttttcttcatactagaaacccctccaaaaatgatatatatttatttattcttacgctgctgttccttacttcttgctgtcacctccctaaaaaggaatttacctacatacgctttcttaatacgtggaagctaaatttatcagctctaaagtaattgatagaatataagattggctcatcattttgatcatagtgcatttgttttaatacaagcagtgctgtttcaggctcacattctaaaatcggtgagattttagggtgatagccaattggctcaatgtgggcaaccgcatatgttatgcgcttatgtgtgttattatgtatcaccgttaataatgattcctcattgtaacccgataaatctggcaatatttcttttgcaagtttatcgatacaatacacaacaggttccccatctgctgtacgcacgcgttcaatcatcactgcattaaaaccatcttcactattaaacttctctttttcctcttctgttaaagttgtagtagatgatgataaaaagattgttcctggtgttttccccacactagaaatcatatctgtaatactagaaagttgttctattccagaagaaaataatggctttgcatttacaaatgtccctacaccatgtctacgaatgacaacattttcttcttctaaaatacgcaacgcttcccttaaagtcgctctacttacgccaagttctttcgctaaatcaaactctgatggtaacttttgtcgttctttataagccccatctttaattttttctttgatgtgatcaatcacccgtagatataggtgacgactatcggattttactgacataagactcccccgcatttcaattattcgacctctgatgtaagacttcttttctcttttttcaacttacaacatagtacaaatgactaaacaccaaaataagcgtaattgtcgaataaataataataattttttttaatgaaattttcactctttattgcataaaaaaaactttgcaccataaacattcctcatttcgagaaaaagttcggcacaaagatcctttacatcctttgttacacacttttcccctcatagtctagcaattcatggttgccaggtagaaacttatggaccttatctccaagattatatgaggcagtgattcttttcgaagtaatcttaccacttgctctcatacgtgtcaacaaaatccaacatttttctgcattaaatatcgaacatttacataaaacataatcaaagtattcgtattctaaagagcacccctaaatgtaagccctttctttattgctgagtatagtatataacaaaaacactatataaaaaagcctaattgtaaaaacaattaggctttttttaagaacttttttcttgtacatcattaatgagcacttctctcggtttactaccttcatacggacctactacaccattcatttccattgcatcaattaggcgagcagctcgcgtataacctactctaaacctacgttgtaacatagaaacagatgctgtttgcatttccactacaagttgaaccgcttcatcatataattcatcttctacttcctgcttcgtatcaggaacatcttgcggaatcatatcttcttgatattgtgctttttgctgtccaataacatattctacaactctctcaacttcatcatctgataaaaatgcaccttgtacacgtacaggtttcgatgcaccaattggtataaacagcatgtctccacgacctaatagcttctctgcaccaccaccgtcaagaattgtacgagaatctgtttgagaagatacagcgaatgcaatacgtgatggaatatttgctttaataacacccgtaataacgtcaactgacggacgttgcgttgcaataattaaatgaataccagcagcacgagccatttgtgctagacgcataatcgcatcttctacatcagacgaagcaaccatcattaaatctgctaactcgtccacaattactacaatataaggtaattcgggttgtttcgcttctgattgactattatgctcttttatataatcgttgtatccttcaatgttacgtgtaccactatgagcaaacaattcataacgacgttccatttcactcacaacttttttcaatgcttgcgatgctttcttcggatcagttacaactggcgttaacaaatgaggcacaccattatatacatttaactctaccattttcgggtcaatcatcattaattttacttcatgtggttttgcacgcattaaaatactaacaataataccgttaatacatacacttttcccgctacctgtcgcaccagctacgagtaaatggggcattttatttaaacgggctagtacagcttcacctgtaatatctcgaccaagaccaattaacaacttctcttccggatgattattagccttagaatcaagaacttccctcagcgttaccatcgaaacttctgagttcggaacttcgatccctacagctgatttcccgggaattggcgcttcaatacgaatgtccttggcagctaaagcaagggctaaatcatcacttaaactgacaattttgcttacctttacccccatatcaggatacacttcatattttgtaactgcaggacctctatgtacttttgttactttcgctttcactccgaaactttggaatgtacgttctaatttacgagcattctcataaatttccgcattttcatttgtaacttgcttattctttggaaattttaatatatcaagtgaaggaagcttgtaatctttattttctacattggaaaattgcataggaggtgcttgcgcttcactctctaacgattcaacaattttttctccacgctttttctttggctcttcaattggcggagtctcttcaataaacggtgaagtaatcaaatcttcttgctctacttcaattcgtttatcctcttcttcatttacaggataattctcagtgaaattcgaaataatcggaggatcaattgagatttcttccatcggctcaataatttcttcttgttctgcagcacgtttgcttcttgtgcttcttgttgtttttttcttttctgtttgttcagccgttcttttagctctccaatctttataatccccttgcatcacttgaaattgacttctaagaattctaccaactggcgctaacacttctccaatatgcttatttgttatacaaagtataccgagaataactagaataataccaatgatataagctcctacttcgtcaaataagaagtaacatgttgcgaacataagcgcaccaaacataccaccacctaaatgaacgctatctggcccctttttcatttcaagaaagaagttatctttcgtactcacaataacagaagtattttgcactgctccatcttttgtaagaaggttaaataatgtaatatgactaaacattaatatcgccaatacaattaaataaaatccaattaatcgtttatttaaaaggttcggccatccgcgttttataacaaaggaaaccgataaagctattacacctaacacaccaattatgtaccactcaccaaagaagaagcgaaaaaataacacaaacgattttcctacaacgcctagctgtaaaatcgtaatgattgaaagtgcaaaaagagttaaaccgacaatttcataatacaaagttggctttatcgtacgccttgcctttgccttcgtccctctttgcttttgttttgccatttcttcacctcgcgttctacatataaataaagctcccctcaaaatgctctatttatatgtctgttttctctatttttcaggtctttatatcttctatttttacacttcttgtaaaatgctaaataaacagaagaaagcagcctactcatggctgctcaaccgtcttgttttttatattataccatagcttctaaacaaaatccttctttttgctaaaaggttattttctgaccgggctcaaactctaaatagtgaagtgggtccgtacttagcacacgtacaatagaataacatccatgttcctcttcagaaaccattaattccacaccatttatatttacaactttttgactttcacattgtgaataatcggccggatacacaagttgctctggcataattgtatataaaatcattgtagcattgtcccttctgtactatcttccgcacgaacatctattaattcgtttaattttcgaattgcatttccaataccgccgacatcatctataagaccgtactttactgcatccccaccaattacattcgtcccaatatctcgcgttaaatttcctttcgcaaacataagctctttaaaacgatcttctgttactttcgagtgcttcgtcacaaaacgaatgactctttcttgcatcttatccaaatactcaaatgtttgtggcacacctatgacaagacctgttaaacgaattggatgaattgtcatcgtcgcagtttccgcaataaacgaatagtcagtagaaacagcaatcggtacaccgatggaatgtcccccacctaaaactagagatactgttggttttgaaagtgaagctaccatttcagaaattgctagcccagcttcaacgtcacctccaaccgtatttaatattaaaagcaaaccttcaattttcggattttgttcaatcgcaacaatttgcggaatgatatgctcgtattttgttgttttattttgcggtggtaattgaacatgaccttccacttgtccgataatcgttaaacaatgaatacgtgattcattcatctgtggtacatttgtctgtccaagctgttgaattttttcgactatcgaagcctcttttccagcttcttttggctcagcttctttttcttcatttgtatatcgatcacgttctgtcatttcgcatcccctttcactcgtatataactattatttcttaagttataaatttcattcgatagggttaaaaagaaaaaagatcacccataagggtgatcttttttatacttccataataatcggtaaaatcataggttttctctttgtctcttcgtacaagaactgccctaataattcacgaatattttgttttaacattgaccattcaattgaatattctttaattgactgctcaacaatcatacgtacaatctctgtagaacgttcaattaacgcttctgattcacgaacatatacgaaaccacgtgaaatgatttctggaccagagataattttcttttcatctttaccaagcgttacaacaactactagtattccatcttgagataacatctttctatctcgaagaacgatattaccaacgtcacctacacctaatccatcaattaaaacattaccagcttgtactttaccgactaagttcgcttcatcgtcaccaaaagcaattacatcgcctttttctacgataaagatattttctcttgtaatacctacatcttcagctaaatatgcatgcgctttttgcatacggaactcaccatgtacgggtacaaagtactttggtttcattaaatttaacattaattttaattcttcttggctaccgtgacctgacacgtgaacttttctttcgccgtaataaacaacttcagctccagctctaaataacaaatcaataatttttgatacagatatttcattacccggaattggcgaagcagcaatgataacagtatcacctttacgaattgaaatttgtttatgtgcttgttttgccattctagatagagcagccatcggttcaccttgactacctgtcgttaaaatagctacctttttctctgggaagttgtctacttcttgtaatgaaataaccataccttctggaacatctaaataaccaagacgtcttgcaatgtctactactttcaccatactacgtcctactaccgctacttttcgccctgtttcagcagctgcatcaaatacttgttgaatacgatgtacatttgatgcaaatgaagcaacgataatacgaccttctgcgccatagaacactttagagatttctacaccaacttctttttctgaacctgtataacctgggcgctctgcgtttgtactatcagataataagcaaagtacgccttcatttccgatttgcgccattttcccaaggtctgctccactatttccaattggagtttgatcgaatttaaagtctcccgtatatacgactgcaccttttgatgtatggaaacaaacgccaacagaatccggaatactatgtgtcgttccgaagaatgacaccgttgtagtgttaaattctactgttgaatttgaatcgattgtttttaggtctacacggcctaacatgcccgcttcaccaagtttttcttgtataagtcctactgttaatttcgttgcatagactggaatagataatttacgaagtacatacacaattccaccaatatgatcttcatgaccgtgagtaataaataaaccttttactcgctcttgattttccactaaatatgtaatatcaggaataacgatatcaattccaaacatttcatctcccgggaacattaaccctgcatctacgataaagatttcagaatcaatttcaacacagtacatgtttttcccgatttcacctactccaccaagagcaaatactttaacagactcattctcttttctcttcatgttgttgcctggtttaaaaatcttgcaaacactgatttcactaaaattgcagagacaccaggggaaactctacaaccaccatattttcaccgtccaagacgaatgtccttaccgttatgcgatatcatgtccttgtttattttttaaaccaggtttcacctctctttcattatataaatcaaatatcttattcgatatgatatgaaaatttaattaaattataatttttcccaattttgctaagcatacccgtactaagctacttagccatattatacctgatacaagaaatagaacacaagttaaatcgtgcgaaagaaagagtaaaagaacggaatgacaacaaaagtatcgaaggtatttcctttatatttacttcgattttatactccatattattttgaagaactagccatacatatgctaaattcatttcataatagggagtttcaagatttatttttctagaatccaacaaaaacacttacaaaatggagtttttttatgaattacgtcaaatttgaggggatttctctaaaaacaaacaccgtagtttattacgtttattccataatatctatcattttttgactcggttaaaggagtacgattattttcttatacacataatgaagaagcgattaatattcttataagaacacatataggtgagaaaacgagaaaaagatttgcatataataaaaaatgacctagttctacactaggtcattttttattaacgagggatagattgcattacagattgtaacgttactctttcttcttctgttaatggaagaagtggtaaacgtacagaacctacatctaatccaaccatttgtaacgctgtttttactggagttggacttggcgccataaataatgaatcagttactcttacaagtaattgatgtaatttttgtgccttcttaaattctcctgattgaaatgctgtaatcatttcttgcatttcgtttccgataacatgagaggctaccgaaacgatacctttcgctccaactgccatagctggtaacgttaaaccgtcatcaccgctgtataccgcaaagtcgtccgctgttttttcaatgatttctgtcattgttaacacatcgccgccggcatctttaatagcaacaatgttttctatttctgataaacgaacaactgtatcaacggagatttgtacaatagatcgtcctggaacgttatatagcataaccggaagcggcgtgctttcagcaattgctttaaaatgctgatacattccttcttgactcggtttgttataatacggtgctactagcattactgcatccactccaacttctgttgcctttttagttaagtcaatagaagcatgcgtattattgctacctgttccagcgattacgggcactcttttatcgacaacagatacgacatggcgatataacgctactttctcttctgaagttaatgtaggagattctcctgtcgttcctcctaccacgattgctgttgtaccgttatcaattaaataatttaccaatttcgttgtctttgcaaaatcgatattcccgtttatatcaaacggtgttaccatcgcggttgcaattgtcccaaaatctatcatggtctcactccttattgttccagttgcttttcttttgaaagctcaaacgcactatgtaatgcatttacagcctccactaaatcaatttcttttacaagaacccaaattgttgtatgactatctgccgattgcaggatttgaatgcctttttccgctaaagctgtaacgatttttgcagtaacccctgggatgcctgccattccagctccaacgatagatactttcgcacaatgttctgtcacaattggctcatatccaagttgttttagcacttcgacagcacgagctgatacattatcatttactgtgtaagctacaccagtaggagaaatgttaattaaatcaacactaatgccttcgtttgccatttctttaaatacatgctgctgtatgtcgtatgccgtttcttttgcaagtactttaatttgcgttacgttcgatacgtgggcaatacctgtaacaggacgttcttctacatcctgcccttttgtagcaccatcgtatgctgcaataagagtaccttcactttcagaatacgtagaacgtacacgaagtggcacttttgcatgcatcgcaatttcaactgcacgtggatgaacgactttcgcaccttgataagccatgttacaaatttcgttatacgttacagtttgaagatgacgtgcatcttttacaatacgaggatccgcagtcataacaccttctacatcagtgaatatatcgatatattcagcatgaagtgcaacacctaatgctgaagctgaagtatcactacctccgcgtccaagtgttgtcgtatcaccttttttcgtttgcccttgaaatcctgtaacgacgattacatctacattttctaactcttcatgtatacgatcgcaattcatttcaataatctttgcattcgtaaagtcatcattcgttacaaaaccagcttgtgcaccatttaatgctgctgcttttataccgttctcattcaacatattagagaaaacaattgcagagattaactctccgcatgataataataaatcttgctcacgtttagaaatagtagattcctcttgatttacaagacttaataacgtatccgttgcatatggttcacctttacggcccatagcagatacgacagtaactactttataaccagcagctaatgatttttttatatgatgaagcgcatgcttacgtccattgtcatcacgtactgatgtgccaccaaatttttgaacaattattttcatattttgcaccttctcttagccgtttacactaattgtaattttactaagcgctctgcaatttgaacagaattccatgcagcgccttttaataagttatcagatacgacccaaagatggaatcctttatcgttatttaaatctttacggattcttccaacgaatacttcgtttttacctactgcagtagctggcattggatataactgctcttctggattatcttgcagaacaataccttccgcatttgcaagtaagctctttaattctgctactgttacgccttctttttctacttcgatgtaaacagactcagagtgtcctgatacaactggtaaacgtacacatgttgccgctacttctaattcaggcatatgcataatttttttcgtttcgttaatcattttcatttcttcaaacgtaaatccattatcttggaatttatcaatctgtggaatcgcattaaaagcaattgggaaatgcttcttatcacctgatacaggaagaacatttgccttaacttcttcgccatttaagattgcttgtgattgttcatgcagtgcttcaatagctgccgcaccagcacctgatacagcttgatatgtggaaacgattactcgttttaaaccatattgctgacgaactggctcaagagctactaccatttgaattgtagaacagtttggatttgcaataataccattatgttcttttaagtcgttttcatttacttcaggtacaacaagtggcacgttttctgtcatacggaatgcacttgtattatcaacaacaatcgcaccgcgttttgctgcttctggcgctaattgtttcgatacagatccaccagcactaaatagtgcgatatctactccttcaaagctttcaggagttgcctcttgaactgtaaattcttcgcctttaaatacaagtttcttacctgcagatcgtttagatgaaagtaacgttaatttcccgattggaaattctcgtttctctaaagtatttaacatttgttcaccaactgcgccggttgctccaactacagcgacatgaaaagttttttgcttttccatcactatgcccctttctagataccaatccttctataacttagaatcagaaggagtatacaataccccttctaatcttaataacgttaattttatcatattctacagtaagaatgatggtttcatcaaaaattgtccgttttttttcgttttttaattcatatatctgaatttttctacgaccaccggttgcaattgcttcccttgcagcgcttctaacactgtatcttccagcagctccatgcgagctaccattgagttcggttttttctctggtgcatcttggccgaatgggacgaagtagatgttttttgttgccattaggcgcatgagatttactccattaagccctagagcatcattcgtcgaaacagccaatacgacaggcttgccatttcttaacgtcgctttcgctgccattaatactggagagtctgtcattgcatttgcaaatttactcatagaattccctgttagtggtgcaattaccatacaatctagtggaattttaggtcctagtggttctgcaccaacgattgaattaattgctttaaaacctgttatttcttcaatcttcttaatccactctgctccttctccaaatctagtatttgttgattgaacagtgtaagaaacaacaggacgtacttctgctccctcagcaattaatttttctaaatgaggcattacttcttcgtacgtacaatgtgaacctgtaaatccgaaaccaattcgtttccccttcaaactcatttcttttcctcctcctttgcaattgcatctgctgctaataactgagaaagaacatttgctaaaatttgcccagccgtttttggggcaacaatacctggtaatccaggtgctagcaatgctttgactcctcttttttccgcatatctaaagtcagtaccgcctggtttagaagctaaatcaatcactaacgtatgagctggcatttttgcaataacattcgctgttacaacgagatgcggaatcgtattaattacaatatcgatatttcctacttctttctctatgtcttgcatatgaaaaggagaaaacatcatttctgtaatacgtgcaatatgttcagatcgtcttgctccaactttgacatgggctcctaatgattgaaatgctctcgcaacactcattcctgttctcccaaatcctagaaccattacattggacccatgaattgtatagtcggtatgttgaattaccatcattaatgtaccttctaccgttggaatagaattgtatattgctacatcatcacgatcaaataatttaacaagttttcgattcgtagtagatacgagattttccaagtaaggtgtaccaatacctgaatatatagtaaagtgttctggtgtattttcaatttgttctttcgttattgaaactttttcatttgaaaaaatagtatctacttctcctttggcatttgtaccggcaaccggcaaaataattgcgtctacagaagtgaaatctaaattttgtatactttcttttgctgcccctgtgaaaccatgatctaactgatcaaaacctatcaaagaaagtttcgcatccaattcaactagcttacgaattacttctagctgccttgcatctcctcctatgacagcaatatgcatctcagtcaacattccctaattcaccttctttttctgtcatttataagaaaagtgcctactttttctttttcctccacatcatatgtaatgtacgagtttatggtgattgaaaatccaaatgcacatatgatttatcaggtttctatgtagatacaaaaaaagatgaccaaaatggccatccttcactccgaatttgaacgatctatactatcacaaagaagcatatcgtgtccgactttctttatttgactccatgccactcttacttcttgtggttcctttttaaaacctccccacttccctacaggtattataagtgtttgtatttgtccgtctttctcattaatctctaaatccatataacctaaggctcccattttttccgctttttctatatctacaacctctttaccgcttaattcacttaatcgcatactcactccactcccctactaaatttttcatttgcattgtctataattagtacctattctatatgtataaaaaaaataaccttctctcatttaaaaagagagaaggttattttcagatacatcgtaaaagttgattatagttttattccttttggaagttttccatctggactaattaatgctgcagagaattcatctgtaaacatgttacgaattaacccatctacattttcttttgttacagtgtttacactttcgataatctcatcaagtgaacgatgcttacgaagtagcaattcatttttaccattacggctcatacgactattcgtactttctaaacttaacattaagtttccttttaattgctctttactattaataagctctttttctgtaatacctgtatttttcaatgtttctaatgtttcttgcattgtttcatacagtgtatctaattgttgactacctgttccaccatacagtgttaacatacctgtatcttcataagaagaatggtaagaaaatactgagtaagctaacccacgttgctcacgtacttcttggaataaacggctactcatactaccgcctaaaacgttatttaatacaattaagttataaatatcttcgtgtcccatttgtaagcctttatatcctaaacataaatgagcttgttctgtttcctttttacgtgctactttgttaaaatggaaaattggactatgtacttgttcgcgatttgttgttccttcataactaccgaaatattgctctaccgtttgtaagaaggcttcatcaatatttcctgcaactgaaacaactacattttcaggtgtataatgatccttaatatattggcgtagcgtatcacctgtaaacgtatcaagtgtttcttctgttcctaaaataggatatccaagcggatgcgtttcatatgttgctttcgttaacatatcatgcacaatatcgtctggagcatcttcgtacattttaatttcttcacatacgacattcttctcttttttcaattcttcttcatcaaatgttgaattaaagaacatgtcagctaatacatctaaagcatatttagcatgttcatctagcacttttgcatagtaacaagtgtactcttttgaagtaaaagcattcacttgcccaccaatactatcaaatgattctgcaatttcgcgtgcactacgtgtttctgtccctttaaagaacatatgctctaaaaagtgagaaatcccgttatttttttcattttcatttcttgatcccgcatggatccaaataccaatcgcaaccgatcttacagttggtatattctccataactattcttacaccatttttacaagtatattttttaatcaaaaactttcctcctactgccagtttctctaaataagtgctattatttaatgataacaagtttaaggatgaatgtcatgcaaatgtatttaatccacacgtttttcatccagtaattctgttatattccctactttatatccttgttccttcaattttttaatcattgtatctaatgcttctgccgttgacgaagtaggatgcattaatacgatagcacctgggtgtatttttctcattactctctgcaatagtacatctggctcaggtcgcttccaatcgattgtatcgacagtccacataatcgttcccatttggaaatcatcagcgattttcacgacttcatcccgaaaacttccactcggcggggcaaaccatctcaccttttgattcgtagcagcttcaatcattcgatttgttttttgtaactgctctcgtatttcatcagacgatagcgttttcatattagggtgcgtataagaatgatttccgacttcttgatttgcatcgacaatcatttttgcaaatcgtaaattttctttcacccaacgtccttctaaaaagaaagtcgccttcacatcatgctttttcaatatttctaatatacgaggcaaatactcgtttccccatgccacatttattgttaatcccaccatctttttattcggatgccccctataaattggagcaggtgataaatcttctaagtggacactcggtgatacttccttaaattcaaggtgtttttgatcaaattcctttagcttcttcatattgttataggatgcttccatatcaacttgtcttccattatatcctggtgttgctttccatatcttatcaatcatcgcattttgaggtgcaatctcatattgttttgcatgcttttgaatttcttcatataagttatcctgtgcaaaaacagaataagagcctaaactgacatataaagaaaatatacatatgtatgccaatatacgaactttcatataaaccctcccaaattaactatataaaaaaacatttttcttcttatctttgttaatttgagcgttataatgaaaactatacctatactgacataaaaatatatataaatcatatttttacataacaaaaaaagccagttaaactggctttcgcttattgctgctcttgtttgttttcttctttagcagcttctttttcttgctcttcttttagcaatacttttctagatagattaacacgaccttgcttgtcaatctcgataactttaaccgtaattacgtcaccgatttttacaacgtcttctactttacctacacgctcaagtgcaagttcagaaatgtgaactaatccatctttaccgctgaataattcaacgaaagcaccgaatttctcaacacgtttcacttttccttcgtagatttcacctacttgtacttcgcgaacgatatcttcgataattttcttagctttgtcgttcatttcttggtttattgaagaaatgaatactgtgccatcttgctcgatgtcaattttaacgccagtttcttcaataattttattgatttgtttaccgctcggtccgataacgtcacggattttatctggattaattgtcattgtaataatctttggagcgtacgctgataattcagtgcgtggctctggaataacagataacatatgatttagaatgtgcacacgaccaactttcgcttgttgtaatgcctcttctaaaatttcacgagatagaccatcgattttaatgtccatttgtagtgcagttacaccttgtgctgtacctgctactttaaagtccatatcacctaaatgatcttccataccttgaatatcagataaaattgtgtaatgctcaccagttttaactagacccattgcaatacctgcaactggagctttaagtggaacaccagcatccatcattgctaaagtactaccacaaatacttgcttgtgaagtagaaccatttgattctaaaacttcagatacaagacgtactgtgtatgggaaatctttttcagatggaattacaggctcaagtgcgcgttctcctagtgcaccgtgaccgatttcacgacgacctggtccacgcattggtctagtttcaccaacactaaatgatgggaaattgtaatggtgcataaagcgttttgattcttctacaccaagaccatctaaaatttgcacatcgcctaatgcacctaatgtacaaatacttaatgcttgtgtttgtccacgagtgaacaaaccagaaccgtgtgtacgagataaaatgccaacctctgatgctaatggacggatttcgtcacctttacggccatctgggcggattttttcaactgtaataagacgacgtacttcttcttttacaattttatataaaatctcatttacttgtcctaatgtatcagcgtcagcttcctgcgcttcgtaatgctcaataacacgctttttcacttcgttaattgcatcttcacgtgcatgtttctcatgtacttgaattgctgaatgcatatcttcttcagccatttcacgtacagcttggttaagatcagcgtcaacttcataaagtttcacttctgatttctctttacctacagcttgtacaatctcttcttggaatgcaattagacgtttaatttcgtcatgaccaaacataattgcttctaacattgtttcctcaggcacttgatctgctcctgcttcaaccatgttaattgcatctttcgtaccagctacaacaaggtgaatatcactttgttcttgctgttctactgttgggttgataacgaattcgccgttaatacgaccaactgttgcacccgcgattggaccttcaaatggaatatctgaaatcgataacgctaatgaagaaccaagcatagctgccatttcagaagaacaatcttgatcaacactcattacgatgctgacaacttgtacttcgttacggaaaccatctgcgaaaagtggacggattggacggtcgattaaacgacttgccaaaattgctttttcacttggacgaccttcacgtttaatgaaaccgccaggaatttttccgactgcatataaacgctcttcatagtttactgtaagtgggaagaaatctacattttttgcttcttttgatgcagttgctgtagatagaaccgctgtatcgccatatcttactaatactgctccgttcgcttgttttgcaagctgaccagtttcaactgttagctggcgaccagctaaatctatcgagaagacttgcttttcttgactcatttaagtacccctctcaatttaaagtattcaattcttctatgtaaatggatagtatatcacaatattctacctctagtattgcctaaaattaagtaagctataaagcgtagaagatatatttttacctaacaaaaaagcgggaatattcccgcttctttgactatcgacgtaagccaagctttgtgattaattcacggtaacgtgtgatatcgctattacgaaggtaagttagtaagttacgacgtttaccaaccatctttaatagaccacgacgtgaatgatgatctttcttgtgagtacgtaagtgctcgtttagagtgttaatttgctccgttaggacagcaatttgaacctctggagaaccagtatcagtctcatgagttctaaattgtgcaatgatttcatttttacgctcttgtgttaaagccatcctatttcacctcctattaattaaacccccaattacctagcaagcgtcggtgagtcgcaatgccaagcaatggttgtcataaagtacataacatagaatactacttttcatttgaaaaagcaagtatattcttttcgctcacaaaatattcttgggctgttttcttatcttttgcgatttgttcaactaactcatcgataccgttgaatttcttttctgctcttatacgcatatgccactctactgtaacattttgatcgtatatatctttgttaaattcaaataaatgcacttcaattgataattgacgctcatcttctttaaaagtcggtttatatccaatattacatacaccatcgtaccattcaccgtgaacttttaatctcactgcataaacacctacaggtggcaataaatactcatcacttaaacctacattagctgttggaaaaccaatttgacgtccacgtttgtcgccgtgtataactgttcccgctacagtataggctctacctaaaatagatggaatttgctccatttcgccatttcgaattaactttcgtaatgctgtagaacttactttctcttcttgaaattcaactttttcaatcacagtctgtgtaaactcccctcttgcatgaaatggtaaagtctccatctttccttttcctaaacgtccatatgaataatcaaaccctgctactacatgctttacatttaaaccaataatataatcatctacaaattgttgcggtaataaccctgcaaatgattcatcaaatttaattacatataatatatcgattcctaagctttcgactattttttctttatcgcgcatcggtgtaatatactccacatgcgcatccttttttcctaaaacaacagatggatgaggatgaaatgtcataactgcacttttatatcctcggtcgtccgctatttttttcgcagttcgaattacacattgatgtcctaaatgaatgccatcaaaaaatcctaatgccattacagtaggtggtaattctaatttattttgttcatgtggatgagttaaatgaataagtttcacgcttgaattcacctttttctgtaataatccttccaataattcattatagctttagttcttgattattcacaagtactttcatcggctttaacataccaggatgtttcggatgatgttcataaattgctaagcaacgatcatttttatcaaacactgtaataaatggtgctgttatttctaattcattttttaagaacataccattctttattttctctgcttgcttttcatctacaaccatttttggaaacttacttaatgcttcatcaattgaaatgaagatagactctactgttccattttgcacgttttcttcaatttcttcaaatgatatgcaatcttctaataaaaattcaccagatgccgttcttataaggtgcgacatatgtgatgggaaaccaagtttttccccgatcattacagctaacgttcttacatatgttcctttactacacgttacacggaaacggaatgaaatattttctccttcaaaaacttcacgatcatcaagtaatatgaattcatgaattgtaattgtacgaactggacgttccacctcttgccctgctcttgcatattcgtataattttttcccgtttacttttacagccgagaacattggtggcatttgttcaatcgtgcctgttaattccgcaaggactttctctacttccttacgagtaatagtacgatctacatttttcgtttcaacaacctcaccagaagcatcttcagttgtcgttgaaaaccctaatgttacttcaccttcatatgttttcgtttcacttgttaaaaattgtgcaattttcgttgctcttccaacgcaaattggtaatactcctgttacatcagggtctaatgttcccgtatgaccaattctcttttctcgcaatatctttcttaatttaaatacacaatcatgtgatgtcatgccttttggcttatgtaataatactacaccttccatatatgttcacctcatcataattctctcgtagtaaatatccaaaacttattttgcattgaaaaaatggatagacaaatgtctatccattattcttcacgtttaccgtctttattaatttcatgtaaaagtgtatcaattcgatgaccatatccgatagactcatcaaactcaaaggtaatttctggtgttttacgaagacgaatacgttggccaatttctgaacgaataaagccttttgccttcgctaaaccttttaaagtattttctttctgttcttcatcacctaaaacagaaatatatactttagcaatttgtaaatcaccactcacttgtacatcagttactgtaacaaatccaatacgtgggtctttaattttacgactgataatgtcgcctaattcttttttcatttgctcgcccacacggttcgcacgtaatttcataactcttcacctcattcaataccattccaaatgtgttattgtacgttcaatttcaggaaatgaatcgatgtactcaagtacacgattcatttctttctcacagataacacgatttgaggatacggaaacaattgcaatttctgtacgttgccatacatcttggtgcccaacttcagaaacagctacattatagcgctgttttacacgagttaacacacgttgtaaaattgcacgtttctcttttaaagaatgcacatcgtaaatcatacactcgaatgagagtgaagcgataatcatcgcttcacttcttccataatgtacgcttcaatgatgtccccttctttaagatcattatatctctcaattgtaataccacactcatagttttgtgcaacttcttttacgtcgtctttgaaacgttttaacgtatcaagttgtccttcgaaaattactacgccgtcacggataatacgtacgccactatcacgcgtaattttaccgtctgttacgtaacaacctgcgattgttccaacttttgttactttaaacgtttgacgaacttctgcttgaccgattactttttcttcgaattctggatcaagcataccttgcatagctgcttcaatctcttcgattactttataaataatacggtgtaaacgaatatcaacgttctctaattcagctgtacgcttcgcgttcacatctggacgtacgttaaatccaattacaattgcattagatgcagaagctaaaatgatatcagattctgtaatcgcacctacaccagtgtgaatgattttaacttttacgccttcaacatcaattttacgaagtgatgctgccatcgcttcaacagaaccttgtacgtctgcttttacgattaagttaatttcttttacatcgccctcttggatttgttggaataaatcttcaaggcttaatttagatttctcaccacgttgtgcaactaacgcttcttgtgcacgtgattcaccaatttgacgagctttcttctcatcagcaaatgccatgaaacgatctccagcctgtggtacttcgtttaaaccagtaatttcaacaggagttgatggaccagcaacttttacacgacgaccaatatcacttaccattgcacgaacacgtccgaatgaagttccaacaacgattggatctccaactcgaagcgtaccattttgaacaagtaatgtcgcgatagttcctttacctttatcaagctgtgcttcgattactgtaccagttgcatagcggtttggatttgctttatattcttctacttcacttacaagaaggatcatttctagtaagttgtcaatgccttcgccttgaattgcagaaattggtacgaaaatagtatctccgccccaagcttctggaactaattcatattcagttagttcttgcattacgcgatcagggtttgcagctggtttatccattttattcacagcaacaataattggtactcctgctgccttcgcatggttaattgcttcaaccgtttgtggcataacaccgtcatccgctgcaacaacaaggattgtaatatccgttacttgtgctccacgagcacgcatcgttgtaaatgctgcgtgaccaggtgtatctaagaatgtaatcttcttatcgtttacttcaacttgatatgcaccgatatgctgagtaattccacccgcttcgcctgcagttacttttgagttacgaatagaatccagtaatgttgttttaccatggtcaacgtgtcccatgattgtaactacagctggacgttcttttaagttctcttcatcatcttgctcatcaatgaatgtttcaaactcagtctcgcttacaattacttcttcttctacttcaataccgtagtcgttagcaattaactcaattgtatctttatccaagtcttggttaattgttgccataattccaagcatgaagagcttcttaataatttcagatggctctttgcttaattttttagcaagatctcctactgtaaggcttccagagaaagtaattttatctggtgtttctacaatttgagtttgttgtctaccagcaaagttctcttgacgtttgtcttcgtttcctttgccttttttctttttcttattgctgttctttttactgcgaacaactttttcttctacttcaaactcatctgcaacagaaggtttttcagtttgatattcattatctaatttatttactacttcatcgtctaacattgtcatatgattcgaaacctcgatattcatttcttttagttttgtcataagatctttacttgagatattatgtttttttgcatattcatgcactcgaattttactcataccttcacccccggtaatttgtatcgagcatgctacgcagctttttcgcaaagcctacatctaacacagctacaacgactcgctcatctctcccaatcgcatgccctaattgttgtcgattttcgacctttctcattggtacgttgtagtacgtagttttatctgtgatgcgttttgtagtatttactgacgcatcttcagatagcaatacaagttttgctttgccacttcgtacttcttttaaaacgagttcttcacccgaaataattttccgagcccggtttgctagtcctaaaaacgatttccaatcggacacttatttcgactccttctcaacaagctcaagaagctcttcatataaagaaccgtcgattttcgcttttagatgatgttccaaaacatttttcttttgagcttgaagaatgctctccttgtccttcgacaagtaagcacctcgtcctgattttttcccagttaaatcaatggacacttctccctctttggaacgaacaatgcgaacgagctctcgttttgatttcatttcttgcgttgcaacacattttcgtaacggaacttttcgattgctcatactcatcacctctattcgatttcgtcttccactgaatcgaatccaaatgcgattacgctatcttcttctgttacaataccaagttgtttcgcatcagactcactcttaatatcaattttccagcctgttaatttagctgcaagacgtgcattttgtccacgcttaccgatagctaatgataactggtggtctggaacaactactgttgtcgctttttcttcttcatctacaagtactttaacaacttgtgatgggcttaatgcatttgcaacatattcaactggatcatttgaccagcggacgatgtcaattttttcaccttttaattcgtctacaatgcgttgtacacgttgcccttttggtcctacacaagaaccaactggatcaacatcagtgttctctgcatatacagagatcttagagcgatcgccagcttcacgtgctacagaacgaatttctacagttccatcatagatttcaggaacttccatttcgaataaacgttttaaaagaccaggatgtgtacgtgatacgtaaatttgtggtccttttgtcgttttttctactttcgtaatgaatacgcgaatacgatcatgtggtttgtattgctcattaggcatttgctcacttacaggtaataaagcttctacttttcctaagcttacatagatgaaacgagcatcttgacgttgtacaatacctaccataatatcttcttcacggtcactaaactcagagtaaataacaccgcgctctgcttcacgcactcgttgtgtgacaacttgttttgcagtttgtgctgcaatacgaccaaagtcttttggtgttacttcaatttctagtacgtcaccatcttggtagtttggattaatttgtcttgcttcctctacagaaatttcaagacgtggatcaaacacattgtctactacgtctttacgtgctaaaacttgaattgttcccacttctgggttaaagctcacacgaacgttttgtgcttgattaaaattgcgcttataagcagagattaaagctgcttcaatcgcatcaataataatgtctttgctaatgcctttttcagattctaatacgagcaaagcatctaataactcagtgctcatgaagatcccccttctaactaaaacgtaacagcaagtcgcgcatttgcgactttatccatcgaaatttggatttcttttttacgtgttttaattgttaataataatgttattgttgtaccatcgtaagaaagcagttttccttcaaacatcttttcaccatcaatcggctcatatgttttaattgccacttgttttcctaccgcttgctggaagtctttttctttctttaatgggcgttccgctccaggagatgatacatccaaaaagtaaagatgaggaattggatcctctttatctaaagcttcgcttaaacgttcacttaccgcaccgcattcttcaatgtcgactcccttttcagaatcgatgaatacgcgtaagaaccagtcttgtccttctttcacatactctacatctacaagttcaagatttaactcttcaacgatcggctgcgcaaatgcttctacaacttctgtgactttcttatccataaacagcctccttcctgccgtcatgtaccatttaaaagaagaagaccccgccactttaaaaacggtctatcttattctttctcgttagctaacaaaagcccctgctgttcagcagggattatctgtcttagtattaccaaatttaagaagtaaaacttgtaacaaaatatgtatatacgacagaaatcttttacctatctacgtagagaaaacatagatagtaacacgaaagagtgggtttccccactcttttctttacacaatatacatgacatggttatctcggttaatagtatatcataggaaatgttgatttgcaaagacttttcctacctactagaacagtgataactggttttgatccggtaaatctcctaaacaaccttgactatctaaatactcaataattgttttcgaaaccttactacgctgctgcaagtcctcttttgataagaagtctccatttttacgtgcttccacaatacttaaagctgcgtttgtaccaagaccaggtaccgcattaaatggaggaattaatgtgtctccatcaataataaattctgttgcatgtgagcggtataaatccaccttttggaatgagtatccacgctcacacatttcaagtgtcatttctagtactgttaataaactcttctctttcggcgcagcatcgagtcccttttgagcaatttcatcaattcttgcacgtatagatgctgaacctttcgccattgcctctacatcaaaatcatctgcacgaactgtaaaatatgcggcatagaataacagtgcaaaatgtactttaaagtatgcgatacgtacagccataagtacgtaagcagccgcatgggctttagggaacatgtatttaatcttcttacatgaatcaatataccaatctggtacattattatttttcatgtcttcttcccattcttccggtacacctttacctttacgaaccgactccatgattttgaaggctaatgatggatctagaccttgatagattaaatataccatgatgtcatcacgacaaccgataacttcgctcagcgtacatgtaccgttataaattaactcgtttgcattaccaagccatacgtcagtaccatgtgatagtccagaaatttggactaactctgagaatgtcgtcggttttgtctcttctaacatctgtcttacgaattttgtaccaaactctggtataccaagtgtacctgttttacagttaatttgctcttccgttacccctaacgattctggaccagagaaaattttcattacttctggatcatccgttgggattgttttcggatcaataccacttaaatcttgtaacatacgaataacggtcggatcatcgtgtcctagtatatcaagttttaataaattatcatgaatcgagtggaaatcaaaatgcgttgttctccattcagcaccaattgaatcagctgggtactgtattggtgagaaatcaaagatatccatgtaatctggcacaacgataataccgcctggatgctgtcctgttgtacgttttacaccggtacaccctgctactaagcgatcaatctctgcatttcgaatcgttaagttatgatcatttgcataaccttttacatatccgtaagcagttttttccgcaactgtaccaatcgttcctgcacgatatacatagtcttcaccgaacagtactttcgtatagttatgggcacgtggttggtattccccggagaagttcaaatcgatatcgggcaccttatctcctttaaatccaaggaacgtttcgaaaggaatgtcatgtccatcttttacatatggaatattacaagcaggacattctttatctggtaagtcaaaaccagaacctacagaaccatcattaaagaattctgattgcttacacttcggacatacatagtgtggtggtaatgggtttacttctgtaatttccatcatcgttgcaacaaatgatgaccctaccgatccacgcgaacctactagatatccgtctactaacgattttttcacaagcttatgtgaaattaaataaattacggcgaatccatgcccaataatactttttaattctttttctaaacgtgcttctacaatttccggtaactcttcaccataaatgctacgcgccattttataactcatatcacgcgtttcatcatcagcaccttcaattttcggtgtgtatagatcgtcttttactggatgcacatcaccaattaatgacgcaatcttttgtgtatttgttacaacaacttctttcgctttgtcttcacctaagaatgaaaaacattctaacatctcatcagttgtacggaaatgtactggcggtaatgaatgtcgatttaacggattggctccgccctgcgaactgactaaaattttacgatacatcgcatcctcagggtctaaataatgcacgtttcctgtagcaacaactggtttatctaacgtctcacctagttttactaagttagaaataattgtttttaattgaccttcgtctcgaacaagctcacgttctactaaatgacgcaacacctctggaggcattacttcaatgtaatcatagaactgggcaatttcttctacctcttcaggtgccttttgcatcattgcctcaaacacttcacctttatcacaagccgttcctactaaaatcccttcacgatatttttttaatagtgatctcggcacacgtggtacacggtaaaagtaattaaggtgagaatatgaaacaagtttatataaatttttcaatccaacatctgatgtggcaagtaacgtcatatgacttggacggccacgcttatacgcatccccttgtcccatgctatcatttaattgatcgtgatattcaaatcccttttcaattacgtctttcaacattttcacaagtaaatatcccgtcgcttctgtatcataaatcgcacggtgatgttgtgttaattcaatatcaagttttttacacatcgtatttaatcgatgatttttcatttctgggaataaaaatcgtgcaagttctaacgtatcaataactggattattcgttttttctagtccagcctttttaaaacctacgttaataaagcccatatcaaagctcgcgttatgggcaacaagtgtatggtcgcccatccattcctcaaactttttaaacacttcgtccacttcaggtgcatcagttaacatatcatccgtaatacctgtcaattcaataatcgtcgctgataatggttgatgtggatttgcgaaagattcaaagcgatcaataatttcgccaccctttacttttacggcagccaactcaatgactgtatcgtatacagctgataaacctgtcgtctcaacgtcgaaaacaacatacgtttcctctgcaagtaaacgatgcgcttcgttatacgctatcggtacaccatcattaactagatttgcttctacaccatatataactttaacaccagccttcttccctgcagaatacgcctctgggaaggactgagccacggcatgatctgtaaccgcaatagcctcatgtccccatttaccagcttgagcaacaagcttagaaactggagtgacagcgtccatttgactcatcggagtatggagatgcagctctactcgtttttcgccttctggtgctttatctttacgagacggtcctgttatttcattaatatcatttgcaatcattactaaatctcgaacgaatgtatcgttttgaacagaaccacgcgctttcacccacattccttttttcaaggattgcagcattggaatatcttctttgtcacgcgagaacattttgatcataatagaatccgtataatccgttatttttaaagttaataacgtacgcccactacgaagctcttttgtttctacatggaagacatatccttgaaccgtttttcttctttcttcatcttgaatttctcgcatcggtgtaatctcttcatctggcttaataagatacccgagtgtaatcggtccttcatacacaacgctgctttcttcagcttgcttcttcgccatttcttccatagcttgtataacacgctcacggtcttcttgctgcgtttgttcacgaaacttttgcatttcttctgtattttgctgtatatgtgtgtctaactgaaaacgcgggaatccaaaaacttcgtattgatcccctactggtttcgcaacgtttttctttaaagccgtagactccagctcgttatttacatttattaacaacttcactccattcacctgtggaagctgcttctttaagtatgcgaacataggtgaaaatgtaattcgttccgtacaaagcggccaatacgccctcacttcttcttctgtaaattgtttattctctgtttctaatgcaaatgttgttcttgcaatatgagaaaatgattgcttaagctttgtttctagcaattcatataattctgtaggcaaaatacgtggcacttgtaaatcaaaatgccaacttttattcgctttatcaataacgagcctttcaataccaccgccttgtaaatattgatttataaggtcgtctggtatttgcaactgctggagcaaaatttgaaatcgctcttgttgttcatttgttaaagacataagcactctccttccatttgctattataaattgaaacgtaccacaaagaaagatttctcacctcttcttttacaaaatacgtttacaaagaaagagaaggtaccccattacgaggtacctcttcttattttaaaatatttgcaatatatgtttgaagttcttctacttttacttcttcagactcacctgtagcacgtactttcacttctacaataccttcgtctgcttttttaccaactgtaacacgaactggaagaccgaataaatctgcatctgcaaatttaacacctgcacgttctgcacgatcgtctaataacacttcatagccttgttcttgtaatgagttgtagatattttcacccatttcacgttgtgcatcagatttcatatttactggaattacatgcacatggaacggtgctaccgcttttggccaaactaagccgttctcatcgttaaattgctctgcaattgctgctactgtacgagatacaccgataccgtaacaacccataataagtggttgtgtttttccattttcatctaggaatgttgcgttcattgcttcactataacgagttcctaatttgaatacatgaccaacttcaattccgcgtgcgaaaagaattgttccgtttccatctggagattggtctccttcttgaataaagcgtaaatctgtatattgacttactttaaagtcacgttctggatttacatttacataatggaacccttcttcattcgctcctgaacatccgttaacaattgatgctacagcgtgatcagcaataatttcgatatcacctgttacattaatcggtcctaatgaaccaacttcacaatttaataatgcttttacttcttcatgagaagcaagctcaacaactgaagcgccatatacatttttcactttcacatcgtttacttcgtgatcaccacgaacaagtacaactactaatttctcatctactttaaacaccatagacttaatgcacttgtcagctgcaatgtttaagaatgcagatacttcttcaattgctttttggtctggtgttgctactttttcaagtgctttttctgcttcgtcactcttcgtatacgtagctacaacaggagccatttcgatgtttgctgcataatcagatgtgtcagagtatgcaattgtatcttcaccaacatcagataataccataaattcatgtgtatcttttccgcccattgctccagaatcagcaataactgcacggaaattcaagccacagcgagtaaaaatgttagagtatgctttatataagcgatcgtatacttcatctaagctctcttgtgtagcatggaaagagtaggcatctttcattagaaactctcttccacgtaataagccgaaacgaggtctttgctcatcacggaattttgtttgaatttggtataatgttaacggtaattttttatatgatttcacttcatcacgcacaagatccgtaattacttcctcatgtgtcgctcctaatgcgaattcacgagcgttacgatctttcatacgcattaattcagatccgtaagaataccaacgacctgattcttgccataattctgcagcttgcatagctggcattaataattctacagctcctgcgcgctccatttcttctcgaacgatacgttctactttgtgtaatacttttaatccaaatggtagaaagctataaataccagaagcattttgacgcataaaacctgcacgaagtaatagctgatgactcttaatttcagcatcagctggaacttcacgtaatgtaggactgaataccatactttgtttcatttatttgcacctcttcattttactcttacacgcagtaaaacccctcacctcgagttaggtgagggattttattctacgagctctatttcattataagtttcactttattttacaagaaaaacttacgaatgtcattccaagttacaactaacataagtaacattaataatgcaaaaccaataaagtgaaccattccttctttttggcgatcaattggtttccctcgtaacgcttcaattaagaagaagaataaacggccaccatctaaagcaggaactggtaataaattaaataaaccaagattaatgcttagaactgcagctaaacttagtacacgcgtaaacccataatctacaacttgatctgttagattataaattcctactggacctgacaactcattaatagaaaattgaccagttactaatttcacaagagactcaaaaattagtttcgtccattggtacgtttgttcaaaacctgatttaatagaacccatcactgttttctctacaggagagtagacaccaattctaccaacttcttctttaccttctttatcgagtgttggcgttactttcacattaaactgttcattatcacgctttacttgtaacgtaatttctttatttgggttttcacgtacaatagtaacaacatctttccatgtacttgtgtttttcccatcaatagcttgaattgtatcattctctttcaatccagcttgctgtgctgcactgttatccatcacttttccgaccattggtttgtcaacaggaaccccttgtacaaatccaagaatcacaaaaataacaaatgctaaaatgaagttcattgcaggacccgcaaagattgttaaagcgcgttgccctagttttttcgagccaaattgtctattatacggggcaatttgaatttcttcccccgcagtaataatacgagccttttcattcactcggaatgtttgaagctcttcctcgtactcttcatagcccgaaattgttaaattatgctccaaatcagcttgttcgacttcaataacacgaacatttggatacttttcatatccatcaaaaactaatttcacaacttcgtctttttcatttaatacaaggccaacctttttcccaggctttaactcaactgtgtccgcatcctcgccagccattcttacatagccaccaaggggcagtaatcgaatcgtatacaccgtttcattcttttcaaatgagaatattttcggaccaaaaccaatcgcaaactcgcggcataaaatacctgctctttttgcgaaatatagatgccctagctcatggaaaaatacgagtgcaccgaaaattaatataaaggcaatcgctgtattcaattccataaccacctttgctaaatttgttccatcacaaaccgtcttgtggccgcatcaatttccaaaatttcctctaagctcggtcgtgcaatgacattgtgatggttcattgctttttcaatgaggtcttccactgttaagaaatcaattctcttttgtaaaaaggcttcaacagctacttcattcgctgcgttcattacagctggcatacttccacctgcttttccagcttcatacgcaaaacgtaaacaacggaatcgttcttggtccattttctcaaaatgcaacgtccctatttcccataagtttaactgttttgtgtctgaaagaggcaatctatccggatatgtaagtgcgtattgaattggtactcgcatatcaggtgaaccaagctgcgccattacactacgatcttcaaattcaaccatagaatggataatactttctttatgtaaaacaacatcgatttgctcataaggaataccaaaaagccaatgtgcttcaattacttctagtcccttattcatcattgtagcagaatcaattgtaattttcgaacccattgaccagtttggatgtcgaagcgcatcttctacggtcacatgatgcaattcatccctcgttttatcgcggaaacttccaccagaagccgttataataagacgagaaattcttttttcattttcaccattcaagcattgaaaaatagccgaatgttcactatcaactggaagtaacgaaacattatgttttcgtgctgcttccattacaagatgtcctgcagttactaacgtttctttatttgcaattccaattgtttttttcgcctcaattgcacgaagtgttggtaacaaccctacgctacctacaacagcatttactacaatctccgcatctggatgtagtgctacttctaaaagtccttcactaccatatacaatttttgtattacctgaaacagattgtaattttaaaacatcttcttctctttgcacagagacgatttgcggagaaaattcttgaattacctttactgcgtagtcaatatttttccctacagaaaaagcaacgagacggaattggtctgggtgcgagcgtaatacatctaaagtttgtgtaccaattgatccgcttgcacctaataaactaatgtttttcatgactccaacccctcgttcatttattaattatattgtaataagaagtagagaattggtaaaacgaataaccaactatctgttcggtctaatataccaccatgcccaggtaaaattgtacctgaatcctttacgccataatgacgtttaaaagcagattgtactaaatcaccaatttgtccaaaaatagaaataataattgtcagcacaattaaaattactacattcgattcgactgggaagaacacgttgtaaacaagtgccacaataattccacaaacgatgccccctaatgaaccttcaatcgttttatttggactgatttctggccacaattttctcttgcccaatgcttttcctacgaaatatgcgcctgaatcagtagcccatataacaaataatgcgcaaaatacatatttaattcctaatattctcgtttcatttaaatataagaatcccattgccacatatgtcgttgccatcagtaaaaatgaagcattatcaaaagtaaatgtattcttagaaaggactgtatatgataaaagtaataaaacaatcacaaatgtgatttccaatttacctaatccaatccatgtaaacagttctgatgcactacttggaattaaaagaatccacaataatactgcagctaaaactgtcggtactgaaataagcgtaagcttattcatacgaattaattcatataaacctatagaagcaagtgcatacactaaaaccgtaaaaggcacgccaccgtatattacgatgggaatgaatagcgcggcagcaaccactccagtaataattctctgtttcactaccaaaccctctctttctacacgcctccgaatctgcgccctctatgttgaaagtcagtaatcgcatttagcaaatgttcttctttgaagtctggccaatacacgtctgtaaaccaaaactccgaatatgcaatttgccataacatgaaattactaatacgtagctctccgcttgttcggattaacaactctggatcaggtaaagaactcgtcattaagtaggaggaaagcatttcttcacttacctcttcagaacgaatttttccttcctcattatctttcatcatatgttgcacagcagaaacgatttcatctcgacttccatagtttaacgcgaaattaagaattaatcccgtattctctttcgtatcttccatggctttctccatcgctctgcgtgtatgcgtaggaagacgatctttttgccctattactcggacttgtacgttttcttcaatcaattctggtaaaaatgtacctagaaattcttctggaagcttcattaaataatcaacttcctttttcggtcttttccagttctcagttgaaaaagcataaagagttaacactttcacattaagtttacttgcaaattttgtaattttctttacaacttgcataccttcatgatgtcccgcaatacgaggcattgctctcctctttgcccatcttccattcccatccataatgatggcaatatgttctgggatatatccttttttcacttcttcaacgagatgatcaaacgatgtgtcctttttacctttaaaaaaaggaaagtttttaaacatcattcataccctccagcaagcagacgtatgcctaaaagtgtaaaaagacccccttaagaagagggtcataattgcgaagttatcgctattacacttccatgatttctttttctttgttttttgcgatttcgtcaacttttgcaatatatttatctgtttctttttggatatcttcagtatatcctcttaaatcatcttctgtaatctcgccagctttttcaagcttcttaagatcatcatttccgtcacgacgtacgttacgaacagcaactttagcttcttcagcatattttttcacaacttttacaagatcacgacgacgttcttctgttaatgcagggaatgcaatacgaattacagttccatcattagaaggatttaagcctaaatctgcttttaaaattgctttttcaatatcaccgatagaagttttatcataaggttgaattactagtaaacgcgcttctggaactgtaatgttcgctaattgcacaactggtgttggtgcaccatagtaatcaacttgtaccttatctaatacagacgcgtttgcacggccagcacgaactgttgctaattcacgagaataagcagcaactgctttttccattttttcatttgaagacttcaatacttgttgtcccatatttatttcccccttaccactgttccgatattttcgcctaaaacggcacgtttaatattacctttttccataactgagaatacaattaatggaatatcattatccatacatagagaagaagctgtagaatccattacacctaaaccttcttttaatacgtctaagtaagtaagcgtttcatatttcgtagctgttggatcaatagatggatccgcattatatacaccatctacattgtttttcgccattaaaattacatctgcttcaatttctgccgcacgtaatgctgctgttgtatctgtagagaagtatgggttacctgtacctgctgcaaagataacaacacgttttttctctaagtgacgaactgctttacgacgaatgtaaggttctgcaacttgacgcatctcaattgaagtttgtacacgagtttgaattccgatattctccaagctatcttgaagagctaatgaattcataactgtcgctaacatgcccatgtaatctgcccctgcacgatccatgcccatttcacttccaattttcccacgccaaatgttaccgccaccaacaacaacagcaacctctacatcaagttctgcaatttcttttacttgttccgcaactgacttaataacagttgggttaattccaaatccttgctctccagctaaagcttctccacttagctttaaaacgacacgattatatttcggtttactcataatgaacctccaattgcttacatctttattttaaaaaagggaacacaatgtgttccctaatctgtattagttgctaccttttacttggttcattacttcttcagcaaagttgtcttcgcgtttttcgataccttcaccaacagcgtagcgaacgaatccttttaatgttccgcctttagactcaacgaactgacgaactttcatatcagggtttttaacgaatgcttggtcaagtaagcaaatctcttcgaagaatttgcctaaacggccttcaaccatttttgcaacgattttctcaggcttgccttcgtttaatgcttgttgtgttaatacttgacgctcatgctcaacttcttcagctgttacagcatcgcggtcgatgtatttagggttaactgcagcgatgtgcattgcaacatctttagcagcagcttcatcagtagaaccttcaagaactgttaatacaccaatgcgtccacccatgtgtaggtaagcgccgaatgcatctgcatcagtttttgatacgatttcgaaacgacgaagtgtaagtttttcaccaattttagcgattgcttcgttgatgtgctcttcaacttttttaccgttttccattgtttgagccatagcttcttcaacgttagctggtttgttagttaataagtgagcagctaattctttaattagtgtttggaaaccttcgtttttcgcaacgaaatcagtttcagagtttaattctaagattaaagcgtcgttaccgtttgtttcgatgaaagttaaaccttcagcagcaatgcggtcagcttttttagcagctttcgcaatacctttttcacgtaagaagtcaattgccttctccatgtcgccgttagtttctgttaaagcttttttgcagtccatcatacctgcgccagttttttcacgtaattcttttaccatttgagcagtgattgccatacttttcatcctcctaaaatatgtatttataccttttataaaggtgtttataccttaaaaaaggtgataaaaggccgaaccccttatcacctttccaactttgttacgcagtaacagtttcttcaccttgttttgcttcaaggatcgcgtctgccattttagatgtaagaagttttacagcacgaattgcatcatcgtttgctgggataacgtgatcgatttcgtctggatcacagtttgtatcaacgataccgatgattggaatgtgtaatttgcgtgcttcagcaactgcaatacgctctttacgagggtctactacgaataatgcacttggaagacctttcatatctttaataccgcctaagaatttctcaagacgctctaactcttttttaagttgaacaacttctttcttaggaagtacttcgaaagtaccatcttcttgcattctttcgatgtctttaagacgcttgatacgcttttggattgtttggaagtttgttaaagttccgcctaaccaacgttggttaacgaagtacataccagcacgagttgcttcttctttaatagcttcttgtgcttgttttttagtacctacgaataagatgtctccgccttcagcagcgatgtcgcgcatcgttctgtaagcttcctcaacttttttcacagttttttgtaagtcgatgatgtagataccgttacgctctgtgaaaatgtaacgcttcatttttgggttccaacgacgagtttgatgtccgaaatgaacaccagcttcaagcaattgcttcatagaaattactgacataatatagttcctcctaaatggtttttgatatcctccgtttacttcatctctaagcgaaactacaaacgtagcaccaacacttaaatcagtaaacgtgtgtactttgtactgacaccactgcttactatatcatactgaaatattacaatcaagtcgaaaatgcgaacaatgtaaaactttctttgttcatactcgaattccagtattaccaaccttcatttcttttaagcaaaaaaataaatacaattaatagttttctcagaaaacacgcttatgacacttttcacaagcaccatctatccattgcacataaaaaactctcctcaatcgaggagagttttttacaaattagtttgtttttaatttagcaagttcctgtagaaacttgtcgtttagcactttaatgtatgttcctttcatacctaaagaacgagactcaataacaccagcactttctaatttacgtagtgcatttacgattacagaacgagtaattcctacgcgatcagcaattttacttgcaacaagtaaaccttctgttccatttaattcttcgaagatgtgctcaatcgcttctaactcactgtaagataatgagctgatcgccatttgaacaacagctttactacgtgcttcctcttcgatttcttctgctttttcacgtaaaatttccatacctacaacagttgagctgtactcagcaaggattaaatcatcatctaagaactcttgaccaagacgagctaatactaatgtacctagacgctcaccgccaccaacgattggtacgattgtagttaaaccttgaccaaataattctctgttttctactgggaatgctgtgtaagcactgttcacatctaagtttgaagatgtttctgtaatgttgaataagctttgtgtatattcttctgggaattgacgttctgcaagcatttgcttcatgcgttcgttttcgatttgttggtgaattgcataacctagtaatttaccacgacggctaactacgaatacgtttgcttcgattacttcacacattgtgtcagacatttctctaaagtttacaggcttccctgctgcgctctgtaataacgcatttaattttctcgtttttgctaataattccatttcaaaagttcctcctacatgttactcacatattttttcatcacttggaaactagggcgagtcacctgatgacactattacaaaataaactggctcacatctttatttttagcaattgttgctaatttctcctcaacgtattgaggtgttatcgttattttctctaacgtaatttcagatgcttcaaacgataaatcttcaaggagcttctccataatcgtatgaagtcttcttgctccaatattatctgtatcctgattaacttgataagcaatctcagcaatcttacgaatagcttcgtctgaaaattcaatttctataccttcagtcgctaataatgccatatattgtttaattaacgcattgtcaggctcgattagtattttaacaaaatcgtctgtcgataattttgttaattctactcgaatcggaaatctcccttgcaattccggaattaaatccgacggtttagacatatggaacgctccagctgcaacgaataaaatataatccgtttttactgatccgtattttgtcgcaacattcgacccttctacaatcggcaaaatgtcacgttgcacaccttcacgtgatacatctacgctattcgactgcttaccagcaattttgtcaatttcatcgataaaaataatcccgagctgttcagcacgataaacagcctcttgtgtaacttcatccatatcaattaagcgctgtgcctcttcatttgtcaagagttttcttgcttcttttacagaaagtttacgttttttcgtttttttcggcataaaacttcctagcgcatcttggaaattcattcccatttgctccatgccagttccttgtaacatatcaaacatggaagactgttgttcagtcacttcaatcgatacaatttcgtcttcaagaagccctgcagcaagctttctctccacatcttgacgcttcttttcgatttcaacatcttcttgtgtatcagacgtttgattcgaattttgagtgcctccaaaaagcatctctaatggatttttgaatccagattgtttctctggactcggcactaaaatttcaacaagacgttgattcgcttgctcttcggctttatcttgaactttcactaccatttcttcttttacgatacgaaccgatgtttccactaggtcacgtaccatcgactctacatctctacccacatatccaacttctgtgaattttgtagcctcaaccttaataaaaggtgctccaacgagtttcgccattcgtcgtgctacctctgttttcccaacacctgtcggtccaatcattaagatatttttaggtgcaatttcgtcacgtaaattttcagctaatttactgcgacgatatcgatttctcaacgctacagcaaccgctttctttgcgtctttttgaccgatgatgtattgatctaatttttccacaatttggcgcggagtaaaatgtaaatgcatataaaatgcctcccttacgattctacaattcttcaacaattatgttgtgattcgtataaacacaaatatcgccagcaatctctaaactcgctttcgcaatttgcttcgctgttaagtgttcacttgcatattgctttaaagcacgacctgcagaaagtgcataattcccaccagatccaattgctaaaataccatcatccggttcaattacttctcctgtacctgaaacaaggagcatagttgttttatccatgacaatgagcattgcttctagctgacgtaacattttatcgccacgccattgtttggccatttcaacagcagcacgctgcaagttgccattatactcttctaatttcccttcaaacatttcaaaaagagtaaatgcgtcagcaactgatcctgcgaaaccagccaaaactttaccttggaaaagtttacgaactttacgagctgtatgtttcattacaacagcatttcccattgtcacttggccatctccagccattgcacattctccattatgatgaactgcaaatatcgttgtagcgtggaaatttcccatagaaaaaactcctttatttgtttttatagcttttaaagcaatttatgcccgcgggtgatgcttcatgtaaacagaacgcaatctttctttagagacatgcgtataaatttgtgtcgtcgacaaattttcatggcctaataactcctgtacagtacgtaaatccgccccttcatctagcatatgtgtagcaaatgtatgccttaacatatggggacttatccgcattgtcagcgaagcctttttaatgagttcatttaaaacataacgaactccacgacttgttagcggtttacctttcgcatttaaaaataccatatgagagtcttcgtcagtcttattaactaactgttttctcccattctctatataagtaattaaagaatcttgcgcatagcttccgaacggaatatacctttgtttttttccttttcccattactaaaattgttcccaccgcaaagtcaatatcggtaagttgtaaattgacacattcactcacacggatcccagtcgcatacatcaactctaacaaagcttgattcctttgacctaatggtgtttctgtgtcagaaacttcaaataattcctctaactcttcagcatataaaaactttgggattgacaattcttttttggggagtgacgcaagtgcaaacggattatcctttcgataaccttcacgcatcaaaaaacgatataaacttcgtaagcttgatacttttcttgcgacagatttacgggctaacttctcatcgtgcaacgtcgttaagtacaaacgaacatccgcgtatgtaacgtctaaaaaagaggatatgccttctcgttccataaattgcacaaaatgttctaaatcattttgataacttgcaattgtatattttgaataatttctttcaatttgtaaatatccaacgaataattgtaacaatttcttcacattcacacaactcacctcaataaaggctactaaatcgtatcacaacttagtagcctttgcaagaaatttaactaaatatttacaaaatttcgaatcgtttctaaagctcgtgctgcgtacgcttcatttcgttctgctttctttttaatcttcttctctaacggtgcaaatagaccgaagttcgcattcatcggttggaagtttttagcgttcgttgccgtaatgtaatttgccatgctacccatcgcagttactggcggtaatacaactggctcttcaccttgcacaagacgcgcagcattaattcctgctaataatcctgatgctgccgattcaacatatccctctactccagtcatttgaccagcgaagaataaatcatcccgttgtttatattgatatgttggacgaagcaaattaggtgaattaataaacgtattacgatgcattacaccataacgtacaatctctgcattttctaatcctggaattaactgtaacacttctttttgcggtccccactttaaatgtgtttggaaacctacgatattgtataaagttcccgctgcatcatcttgacgtaactgaacaacagcatatggcgttttccctgtttttggatcttccaatccaacaggtttcataggtccaaatactaacgtctgtctccctctacttgccataacctctactggcatacaaccttcaaagaaaatttctttttcaaactcttttaaaggcactgtctcagcagcaattagagcctcataaaaacgatcaaactcttcttctgtcattgggcaatttaaatatgcagcttcacctttgtcataacgcgattttaaatatactttattcatgtcaatgctgtctttttctacgattggggctgcagcatcatagaagtagaaataatcttctcctgttaattctttcaattttgcagaaagatcaggagatgttaatggacctgtagcaataattgtcggtccctctggaatatctgtaatttcttcattcattacagttacatttggatggttctttacgtattctgttactttagctgcgaactcatgacggtctacagctaaagcgcctccagctggtacagagcactcatccgccgcacgaataattacagaatccattaagcgcatttcctctttaataactccaactgcatttgttaaagtgtttgcacgaagtgagttactacatactaattcagcgaatttatctgtgtgatgagctggcgtttgccttaccggtctcatttcatataatctaacttggacaccacgttttgcaatttgataagctgcttcacttcctgcaagacctgcgccaatgacgtttactacttgtgttgtcatttatatcacctttccttttcttcccgaaaaaaatgtgagcagttacgctcacatttgttgttcttcttcataatcgcacgaaatacattgtacttgcacgccttttttcaactttttctctacaagcatgccttcgcacttcggacacttacgaccaattggcttatcccaagatacaaagtcgcattccggatacgtaccgcacccatagaaaagacgtttctttttattactacggcgttcaataatttgacccttatcacactttggacaagtaacaccgatttctttcacaatcggctttgtattacgacaatctgggaaattcgagcaagccataaatttcccgtatttacccattttaaagaccattgggtgattacataattcacaatcttccccagctggttcatctttaatttccacttcacgcatttctttttccgctttttctaaacgcggttcaaaacctacgtagaaatcatcaacaatttttacccaattcgcatttccttcttctacttcatcaaggctttgctccatattggcagtaaattcaatgttaataatttctgggaaaaactctaaaataagttcaattactatttcaccaagttcagtcggaacgaagcgtttattatccaagcctacatacccacgcttttgaatcgtttcaagtgtaggtacatatgtcgacggtcttccaattccaagttcttcaagtgttcttactaggcgagcctctgtatagcgcggaggaggttgtgtaaaatgttgctttggttctaaatcctttgaaaatacagtttcccctacttctaaaggcggcaacatcttatccttttcttcagcaccatcatcttttgactctacatacactttcataaatcccgggaactttacaaccgatccacttgcacggaactgaacattgttattaatgagtctcgctgtcacagtatccattatagcagacgccatttgacttgcaacaaatcgctcccaaatcaatttatataatcgaagttgatcacgacctaagaaactttttagttcctctggctttctcattaccgaagtaggacgaattgcctcatgcgcatcttgtgcatttgactttttcgtttctttcttcttttctgttcctatgtattccgtaccatacgcttcagtgatgtaagtacgagcctctgtttgagctgtttctgagatacgtgttgaatcagttctcatatacgtaataagacctacagttccttgttttccaagatctatcccttcatacaattgctgtgcaagcatcattgttttctttgctcgcatgtttaacttacgggctgcttcttgttgcaaggaagatgttgtaaacggtaatgcagggttacgttttcgctctttgcgcgttacattttcaactgaaaacgcattgtctttcatctgttcaattatttcattcacttgcgtttcatttgttaattgaactttttcaccatctacaccgtaaaagcttgcttcaaatgtgtcttttccttttacaaattctgttttaattgtccagaattcttcaggttcaaagttttgaatttccctttcacgctcgatgattaaacgaactgctacagattgtacacgtcctgcacttaatcctttttttactttcttccataataaaggactaatattgtaaccaacaagacgatcaagtatacgtcttgcttgttgtgcatccactaaatccatattaattgcacgaggatgtttaaatgattctttgatcgcatctttcgtaatctcattaaacacaacccgacaatctgattcaacgtccacatttaacgtattcgctaaatgccaagcaatcgcttccccttcacggtctggatcggccgcgagatagactttctttgcttttttggccgctgattttaaatcttttaagacgggacctttaccacgaatggtaatatacttcggggtgaagttgttctttacttctatccccatttgactttttggcaaatcgcgaacatgtcccatagacgcgacaactttgtattttttccctaaatatttctcaatggtcttcgccttagaaggcgactccacgattacgaggtaatctgacatgctagtgcctccttaagaggtggattcaagtcttcattaatcttattgatttctcttgtttttgtcaatcaagaatgaatataccatacagtgccaatctaccatttgtcaataattgtttaataaaaacataaaaatataaggttaatttaaaatctcttccaagatatcttctgcatttcttactagttttgctccttgctgaataagatgattcgttcccgatgccccctctataaatataggtccaggaagcgcaaatacctctctactttgctctaacgcaaggtccgcagtaataagtgttccacttctcgatttcgcttctacaactaaaacacctttacttataccactaataatccggtttctttttggaaaataccattttttcggtgcatagtgcggcggatactctgtcaataacaatatatattccttccacatttcatataaaggtctattttctttcggatacataaaagacaatccatgccctaatatcgcaatagtcgggcaatgatgtcttactgtaatctcatgagacattgtatctatcccttttgcaaacccactgacaataagccactctctttctaataaagggtgtaaaataaacttcaaactctcatgaccatataatgatggttctctcgttccaacaactgctaatttatttactttattcaggaaatctttctctccttttccatataaaacgaagggagggtcttgtatttcacgtaataattgcggataattttcatcccatatcgttatataaaaaatacgatttttctctaaataagatatatattgcggaagatttgaactttgaagaaattttactagttctgaagattttttcgaggatattccagtgtagtgttccatttgtttttcgttaaaattatatatgttctctaattctggatcgacatatagtagcctctccatcgctttccaataatctgctagcaagtaatgaagatgtaataatctctctcttttcatcttgattctccttacccataatttttattatgtaaacagaaaaagtctaaaaagacaccctcaagtaagaaggtgtctttcaacagattaatagtttttacaagtctcaaataaacctttttcttttaaaacagagattagcgtttctcccataactgctggagtttcagctactttaatgccacaagcttccattgttttaatcttttcagcagcagttcctttaccgccagaaatgattgcaccagcatggcccatacgtttgccagcaggcgctgtttgaccaccaatgaagcctacaacaggttttgtcatattagcttttacccattcagctgcctcttcttctgctgtaccgccgatttcaccaatcataattacagcatgtgtttcttcatcttcattaaatgcttttaaagcatcaataaagtctgtaccgttaacagggtctccgccgatacctacagcagtagattggccaataccttcttgtgttaactgatgtacagcttcatacgttaatgtaccagagcgagatacgataccaacatgaccttttttatgaatatatcctggcataataccaatcttacattcatccggtgtgattacacctgggcagtttggtccaagtaaacgtgtatgtttacccgccatatatctctttacgtttaccatatctaatacaggaatcccttcagtaatacatactactaaatcaatttctgcatcaacagcttccataattgcatctgccgcaaaagcgggtggaacgtatacaactgaagcgtttgcgcctgttgctttcactgcatcttctactgtatcaaatactggtacaccttcaatatcagtgccgcccttacctggtgttacaccaccgacaattttcgtaccgtattcaatcatttgttttgtatggaataaaccttgagaacctgtaataccttgaacaataacttttgtatctttattaactaatacgctcatttttctcccccgctttctattagcccactagtgaaacaattttttgtgcaccgtctgccatagattctgctgcaacaatatttaagccagactcatttaaaattttcttacctagttctacgtttgtaccttcaagacgtacaactaaaggtaactcaagacctacttgtttcgttgcttcaataacaccttctgcaataacatcacacttcataatgccaccaaaaatgttaacaaagataccttttacatttttgtcagaaaggataattttgaatgcttctgtaactttttctgcagttgcaccgccaccaacatctaagaagttagctgggtcaccgtggtaatgtttaatgatatccattgtagccatcgctaaacctgcaccattaaccatacaaccgatatttccatctaaaggaatgtagtttaagtcgtattttgaagcttcaatttcttttgaatcctcttcatcaagatcacgaagctctaaaatgtctttatggcgatataatgcattagaatcaaagtttaattttgcatctaatgccataactttaccttcacctgttgtaacaagtgggttaatctcagcaatagagcaatctttttcgataaacgcacggtataagcccatcataaacttcacagcttgtcctacaagctcttttggaatattgatgttaaatgcgattcggcgcgcttggaaaccttgtaagcctactgctggatcaatatattctttaaagattttttcaggtgttttttctgctacttcttcaatttctgttccgccttcttcagacgccattaaaacaacttgagaagttgcacgatctaaaactagacctacataatattcttttttaatatcgcaaccttcttcgataagtaagcgttttacttccttaccttcaggacctgtttgatgtgtcacaagtgtagttcctaaaatgctttctgcatatgtacgaacttcatctaaattttttgcaacttttactccgccagctttgccgcgtccaccagcgtgaatttgtgctttcactacacatacatctgttcctaattctttcgccgcttctacagcttcttctactgtaaatgcaaccttcccgttcggaacgctaaccccatagcttctaaggactgccttaccttggtactcatggatattcatggtcccatcctcccctgttttcctgttttactcgaaaagttttttaatgtttaaaaaacattacattgccattgtataagatgattggcacgctgtctacaataaagtgtcagaaaactgaaatcgctttattctttttcggaaatagtaatgtttatatgccaaaataaaaaaataagctgtatatttacaacttatttttgaatcatatctttaattggcgcgaatgactttcggtgttcatctaatactccatgcacttgaattgcctctaaatgttgctttgtgccatatcccatatgttgctcaaatccatattgaggatacttctctcccagttctttcatcatacgatctctcgttacttttgcgataatggatgcggctgaaatcgaaacacttttcgcatcacctttaataattgatgtttgcggaattggtgtaggaagtttcatcgcatcaattaataaatgttggggtgtacaagataaattcgcaactgcatctaacatcgcttgtttcgttgcttggtaaatattaatgtcatcaataacttgcggcgatacaattcctactccaattgcaattgcttgtacttttatttcatcataaaaacgctcacgtttcgcttcactcaattttttcgaatcatttaaccctggaatataaaaatcctcaggaagaacgacagctgccgtcacaacaggcccagccaatggcccacgccctacttcatcaatacccgcgatatatgtgacccctttttcacgcaaagcattttcatacttggacatctcaaaaaacttctctttttctttctgttctaactctttttgtttataccacttcaaaacgagcttttgaacaccttttcgatcatctttcattaacagttgaaagcgatcatcttcttcattcataatttctttcaatacattttctgcttcttttatcgttatagtttgcatttatacaagctcctttttaaacatatccaaaaagaaaagacgcacaaacgcacgtcttatacttcttctattttttccacatcttctacttgctctgcaaactcttccggtgtttcaaacgtcatttttccaagtttgccaccacgaagctcccgaagcacaagctcagatgtcttatcataatcaatcattccgccgcccattaagcagcctctattttttccaattgcatcgaataattccacaatatcttctggaatctcatttaaattatagcgttctttcaagcgttctggataatgtttctccataaaacgtaatgcgtaaacagctacatcttgtaaatttaaaattgaatctttaattgcacccgttgtcgctaagcgaagacccactaattgatcttcaaatttaggccacagaatacctggtgtatctaacaattccatttccttcccaactttaatccattgttgagctgttgtcacacctggacgatctcctgttttagcaatatttttctttgccaatttattaatcaatgtagatttaccaacatttggtatacctacaattaatgcacgaatcgctctcggtctaataccttttgcaaccattttatcaaatttttctttaacaagcactttacaagctgctgcaatttccttcataccttgtccagcttgcgcgttaattgaaattgccatatggcctttttctttaaaatatgcgatccattgttttgttaaacgatcatctgccatatccgctttatttaaaacaacaagccttggcttatgtgtaatgatttcatcaatcattgggtttcgagatgataatggtaatcgagcatctacaagttcaattacaacatcaattaattttaatttctccgttacttggcgtctagccttcgccatatgccctggaaaccattgaattaccatgttgccaccttctttttcatttatttcacaatacgtgcgtcttctaacggccaatataacatattagctttaccaattacttgatccattgaaatcgtaccgattgaacggctatctttactaaaacgacgattatcacctaaaacaaataattgatcttttggaacggttttcttgcctgtcatttcttcaagattaaaatcatatgtaagcggtccgtcagcaatttgctttttctgcttgtctaaatacggctcctcataagcctttccgttaatatacagtttatcattacgatactctatttcatcgcctggcaggcctataatgcgcttaatgtaatctttatcttctgttgctcgaaatacgataatatcaaagcgttttggatctccaatgtgataaccaattttattcacaatcattcgatcacgatcatgtaaagtaggtgccatcgataccccgtctacgagaattggcgcaaagaaaaactgtctaataacaccagctaatacaacagcaatcaaaattgctttaatccattcccaaagtgaactcttctcttttttcatgcatttcccctccacggttatgtaaactgctcgtattataccaaaatttcatatagattggaaaaagggagcttgtgcatttacaagctcccatacatgtcttatcgaatttctttaatacgtgcttttttaccgcgaaggttacgtaagtagtataacttagcacgacgtactttaccacggcgaagtacttcgattttcgcgattcttggcgtgtgaactgggaatgtacgctcaacacctacaccgtaagaaatcttacgaactgtgaatgtttcactgattccgccaccacgacgtttaattacaacaccttcgaaaagctgaattctttcacgagttccctcaacaacttttacgtgtacacgtaaagtgtcaccaggacggaatgaaggaaggtcagtttttaattggccttttgtaatttctgcgattaattgttgcatattaaattctctcctttaaacagatgctcttataaagtcttaataaattacagcggaacatcgttaatacggctactgatttcagtagcacaaatgttataatagcatattactaggcctgttgcaatagcaaatatatgaagttattactgctctcgctttatttcctcaagccattttttctcttgtttagatagctctctctcatctaataaatcaggtctacgcgtatacgttcggcgcaaagattccttatgtcgccattcatcaatgtttttatgattccctgacattaatacatccggtaccttcataccacgaaaatcagctggacgtgtataatgaggatgctctaataaacctgtactaaacgaatcctctacttgtgaagcatgatttcctagcacacctggcaagagacgtaccacactatcagtaataaccatagaggctaattctccgcccgttaatacatagtcaccaatagaaatctcatccgttacgagatgctcacgaattcgttcgtcatatccttcataatgcccacatacgaagattaaatgttcttcccctgcaagctcttccgctttcttctgcgtaaatctttcgccctgcggacacattaagacaactctcggcttacgctctgtctctttcgtcaaatcctctacagcatcaaaaataggctgaggagtaagcaccataccagctcctccgccgtaaggataatcgtctacgctattatgcttacttgttgtataatcacgaaagttaacaacacgaaggtttaccgcttctttttcttgcgccttctttaatatagaagatccaaatacaccggtaaacatgtctgggaacaacgttaaaatatcaattttcattatagcagcccttccattacatgaatggttactaatttattttcaatattaacttgaagtacaacatcatcgatataaggaattaagagatcttgacccttcgggcgtttaattacccaaacatcatttgcaccaggagatagaatctctttgattgtccctagcgcttctccttcttccgttacaacactgcaaccaataatttcatgatagtagtattcaccttcagcaagttcgcctaactgctcttctggtacttttattaaagaacctttaaacttctctacttcatctacattgttatatccttcaaatgttaataaatcgaatgtcttatgttggcgatgagaagttaccttcaccggaagatagtctgtgcctttctcattcgatatgtatagcgtgtttcctactttatatcgctcttctggaaaatcagtacgagaaataacacggatttctcctcttacgccatgagtatttacaattttccctacgttaaaccattttgtcataaatagtatgtcacccctggtttctatataaattaagcatctccatttcgcagatggaacatgcaatctctatttaaatgttaaaaaagggagaggaataactcctcgccctttttacgtttattgaatttccagtgttactttttcatcattatgatgtcccactgaatacaagagcattcgaatcgctttcgcaactctcccttgctttccaatgacttttccaacatcctcaggatgtacagttaatcgatactttatctctccgttgcaaagttcctgtgtaacttttacatcttcaggataatcgacaagaggcttgacaatcgtctcgactaacttcttcatagtcattgcctcaattacttaccttgtttagataagtggaatttctccatgataccttggttagagaataagttacgaactgtatcagatggtttagcaccatttcctaaccattttaatgctgcttcttcgttgatcttaacttcagctggttgagcaactggattgtaagttccgatttcctcaatgaaacgtccgtcacgaggagaacgagaatctgcaacaactacacgatagaaaggagtttttttagctcccatacgttttaaacgaattttaactgccatttataaagcacctccgaatttatttcacacagataattatattagcaaaaagactattgctttgtaaagtattttttcttaacagagccatctttttttccttacatgaatggaaacttcaatccacctagtccttttttcttacctttttgcattcccgtcatcgtcttcatcatttttttcatgtcatcgaattgcttaattagacgattgatttcttgtacagttgtaccgctacctttggcaatgcgctttttgcgactagcattgattatttccggttgttctcgttctaatttagtcatagaacgaataattgcctcaatatgcccaatttgtttttcatcaacttgcgcatttttcagccctttaattttatttgcaccaggaagcattcctaacaattcatcaagcggcccaagttggcgcacttgtccaagttgttctaggaaatcgtcaagcgtaaacgaaagcgtacgcattttttgctcaagttcttttgctttctcttcatcaactgtagcttgcgctttttcaattaacgttaagacatcgcccatccctaaaatacgggatgccatacgctctggatggaacgcttcaattgcatctagtttttcacccataccagcaaatttaatcggcgtgtttgttacagccttaatagataatgcagcaccaccgcgcgtatcaccatctaatttcgttaatacaacacctgttaaacctaactgttcatggaaactttgtgcaacatttaccgcgtcttgccccgtcatcgcatcgacaacaaggaaaatttcatccggtttcgcaacttctttcactttcgctaattcatccattaattcttcatcaatatgcaggcgacccgctgtatcgattaaaacataatcgtgatgatcttcttttgcttttgcaatcgcttgtttcgcaatttcaacaggacttacttgatctcctaaagaaaatacaggcatgtccaattgcttccctaatgtttcaagctgtttaatcgctgctggacggtaaatatccgctgcaacaagcatcggtttacgattatgctttttacgaagcaaattcgcaagcttacctgtcgtcgttgttttacccgcaccttgcagaccaaccatcataataacagtcggtggcttattagcaacagcaattttgctttgctctccgcccataagttctgtaagttcttcctgtacaactttaattacttgttgtccaggtgtcaaacttttcattacatcttgtccgacagcacgttcagacacacgcttcacaaaatcttttactactttaaagttaacatccgcttctaaaagagctagacgaacttctctcatcatttctttcacatcggcttcagaaacttttcctttgccgcggattttttgcattgtctgttgaagtcggtcggctaatccttcaaatgccatattgccgccctcctaatctaatttttcgatagcttcaacaacttgtttcatttcttcattcacatgctcttcttcgctgattagctgttttagctttgcaacaagtcgctgtcgctcttgaaacttttgaagtaatactaatttttcttcatattcttcaagcatcgcttcagtccgtttaatgttatcatacacggcttggcgacttacatcaaattcttccgcaatttcaccaagagataaatcatctagataataaagcgacatataacttctttgtttttgcgttaacaacgattgataaaaatcaaataaatagttcattctcgttgttttttcgagcatgttggatcatcctttgttaagtgatttccctttacatgaattagtttacatgtagtccaaaagagtgtcaagtttttttcttaacatcatatattttttatagaaaaagaagcggaaataccgcttctttcgcttatacttcttctgtttctactaagttcgcaaataaaccatacacatattgttctggatcaaactgctgcaagtcatccatttgctctcctaatccaacaaacttcaccggtacatccatttcgttacgaatcgctaatacaataccacctttagcagttccatctaacttcgttaaaacaataccagttacattcgttgcttcacggaatgttttcgcttggcttaaaccgttttgtcctgttgttgcatcaataacaagcaatacttcatgaggagcacctggtacttcacgctcaattacacgcttcaccttctctaactctttcattaagttcactttattttgcaagcgtcctgctgtgtcacatagtaatacatctaccttacgtgctttcgctgcttgtacagcgtcatacataaccgccgctggatcagatccagatccttgtttaatcacttctacaccaacgcgatcgccccatacttctaattgttcaatcgctccagcacggaatgtgtctcctgccgccaataggactgacttaccttctgatttaaacttatgcgccagtttaccaattgtcgtcgtttttcctacaccattaacaccaacaaataaaacgaccgttaattggtcctcttgcatattaatttcgttactaaaatcgctgtcacctttgtaaattcctactagtttttctgaaataacagcttgtacttcttttggatcttgaatgttacgacgttgtacttcttctttcaattggtcaattaattccattaccgtcgcaacgccaacgtctgcaccgattaaaatttcttctaactcttcgaagaaatcttcgtccactttacggtaacgatacactaaatcattcactttatccgcaaatgaatttctcgttttttctaatccttgtttaaatttctctgtaactgtatccgtttgttttgaaattttttcttttagttttttaaaaaaactcatactttcccatccttcctattcacttgcaataagttcttctccggcgtctaaacgaaccgaaacaagtttagatacccccgattcttgcattgttacaccgtacaacacatcagactcttccattgtaccttttctatgtgtaattacaataaactgcgtctcatcactgaatttctttaaatactgtgcaaaacgagctacattcgcctcatcaagggctgcctctacctcatctagtacacagaacggtactgggcgtacttttaaaataccaaataaaagcgcaattgctgttaaagcacgctctccacctgaaagtaaacctaagttctgcagtttcttccctggcggttgtgctacaatatcaatacccgtatttagtaaatcctctggattagtcattactaaatccgctctaccgcctccaaataattcagagaataccgattgaaactccattctaatgccttcaaacgtagtagaaaagcgttttttcatttcttcatccatttcggtaataagctggtgcaatgtcgctttcgcttcttctaagtcgtctctctgctctagtaagaatgtatgacgctccgctacacgttcatattcatcaattgcccctaggttcactgtacctaactcttctatggataatttgattaattttactttcttacgcgcatcttctgcaggcattgtcattgtatattttagttttgccgcttcaaatgaaatcgtatatgtttcacgtaaatgttgtaatctattttccaactctacatccagtcgatttattctcacttcttgatctttcaacatttcaagaacatatttatgtttacctgtcgtttctttcaaattgcgctctaaatgttctactctctcttgcaacgatacacgttgttcacgacgagagcgaattaattctgaagtttgattacgatcatatgctttcttctcaatcatattcgtaatttgctcttcaccacttgaattagatgtcatttcttgttttaagaacgctaaatcctctttcgtttttacaagtgtcgcatccgtttcttctttttccttcgtcaatcgttcaactttttctttttgattagataagcgttgttgcttttcagctgccagcacttttaactcagtcatttctttttgaactttttctttcgaagaatgttgctcacttttttgttttgttaaagctacaattttactatctaacttagtgatttcagcttgaagattcgttaaaaccccttctaactcctctttacgcccttgcatttttactcgatcttgtaaaaacccttcaatctctaaatcataaatagacaaccgatcattaatacgatgttcttctaattctaaacgattaatctcttctcttaatttctgctcatctacacgatctgcttctacagtttgccttagttcgcgtattttcacttctttttcttgaatctcttgttttactgctttaacaaagttttctaacttcgttgttttttcttccatatcagttaacttgcgagtccactcttccagttcacgttggcgtcctaataaagaagatttcgcttgctttaccgccccaccagtcatagaaccgccaggattcactacgtcgccttcgattgttacaatgcgataacggtattgcagttgtttcgccaactcatttgctccacgtaaatctttcgcaacaataacagtacctaataaatttgaaactacattttcatatttattgttgtactgcacaagttctgccgccacacctacaaacgatgggtgttgatttgcaatgcgtaattgctcaaatgataacgatctgcttttaataacagcttgcggtaaaaacgttgcacgtccatgtttattttgctttagaaatgcaatcgcattacgagcatgttcctctgtttgtacaacaatatgctgcatcgctgcacctagagcgatttccattgcaacttcgtattctttcggtaccgttaacagttccgcaacagcaccctcgataccttgcaacctattttctctagctttcaatacttcacgtacaccttgatagaatccagaataatcttcttgcatctcttcaagcatttcttttcgagaacgtgcctgttgcacaaattgatatgcttgatacagttttgtttcattttcactatactgcgtcttacatttcccaagcgccgcctctgtcttctgtatatttgagagaatgccagctactttttctttcgcttgttcgtaactttctacaagtttcgtctttttcgctgtaatttccatacgcatttctacatatttcgcattctcttcatctagacgctcgtttttagacgtttgctgtttcgattgttcttcaatcatagataattcattacgatgactagcttgttgatttaaaagctcaatatagtcaccttttaaattctcaatctgttcctctaaattgtcagcaaaagtagcaagcagttgctcattatcatgcaatttttgctccaactcttttacttcattcacaaattgcattaaagattctgtacttgactcaatctcaccatcgtaacttttagctttctcagttaattcaacaattaactgctcaagttgcgcacaatgcgtcgtagcattttgctttctttcttttaacaactcacgctgcccttctagtttttctagctctttactagaaagaagaagtacttcttgcaacgagtctacagactcgtctaccgcttgtaattgtcctcgtaattcctcaagctcttcttcacttttttgtaaattcgttgacattttagcttcttcgtttttattatgcccaaactgatttcgaagcgcttcccatttctcatgcaattcttcaatttcatgaacaataagcgcagcttctactttctctaattcttctttattctcaagataatctttcgcaatagaagcttgtctttctaaaggttctacttgactacttaattcatgaattatatcttgtacacgatttaagttttcttgtgtttctgctagtttcccttcagctttctttttgcgaagtttgtattttagtacgcctgccgcttcttcaaatacacctcgacgctcttgttagtgataggtaaggatttgaagttatctctaccttttcccccactccacaccgtacgtgagactttcacctcattatactgtttaaaagtttgttcatttcaattaatggaaaaccgtagagtttctatccttaagttgatgggcatgggattgtagcagcaatagcgataaataataggaaaactctatacaaacaccttaaaaatataactgaacgctctgacaaatcaccttgtaagtaaaaatacaaatagtccgtaatagccaatccagttaatactaggataaaaataaacaatttactttttgcattgaaaatagcaggtcgaaagatcagtgtaactccaagtaatagaagcaataaatctataatcggaaaaataaatgagagaaaaacatctccaattgataagaataaaatatttgcagatggtttattaaataggtaccactctaatgtaaaaatagcagtaacaacaatgcataaatcacaaagtaaatatgctttctcccatttattacattccatcataattttataaaagaacgcaaaaagaaagaagaataagaaaaacagtagaaatacatcagaaatattaaaattttgtattggtaattctacattaagtacttgaaaagcggatatgaaatttcctatcaaaaaacaccctattgcaatagtaatgcaaacccagaatactcctaacttaattttttgggataatatagaatacagtaatgagataaatacagtagtttcaacgactaaagatgatagtcggatattaaaatctgatacgaaataatgattcggaaaaacaaataaaaatataaagcaaaagcttatataagctattaaagccaatatcaatacataaaattgcacatatgcatgcttacgcaatggactcaccttcttgagttttttctatacttttattaaaaaatgtcttgatagtggcacaactcctactaaatttaaatgtgtgctacctattatccatattatgacctttttaaaagatttctttctacatacaacagtcttgttaactttttgtagatgtttacaattattaatactgaggattctaaaaaggataagctgaaaaatgtagttttttaagtatttgcgcatcgtaaatttggcgggtacaacttatctactctttacatatgagatagaatctactcctctattggattatagttgctatctgtcacacttaaaaaggaatgaaaatatactatcattaaaatagaaattcaaattagtttacgaaaccaactgtaactattatagttacataaaaagttgatgtcaatttcatatcctccctttttaacggacaaaagacatgacctattgaacaaaaatgtgatgtttataaaaagggcggtaaagttttatctccttactcaaagaattataaatgatttagaattagatgaaattgaagctaatattgcatctccctaaaaagaatgttactctaaaaatagaattatgaaaggaatgatggatgaataatgattaactaatttatattttaagttgaattttataacttcaaactacaaaatatagggttagtctatccatttttaaaattcagttcatactttatttgtcatgattcaaatgattaataagtacttattaagtatagacgaaagactaatccttccgattacaaattgggggatttttttattcccgtttgtcttagttgaaacttactaattgttaaatgtacttcacaaataaaggagcgagaaaaatgagtacttcagatactattgttacacatgtaatgctctatataagtcgttaatatccatcaaacttatatagaggaattaaaaaatggatggatgttccgactttatatgaaacgtttcgatatataaaggaggaattattatgtcaatgataaaggtccaagacttaactttttcatacccaggtagctttgataatatttttgaaagtgtaaacttccaaatagatacggattggaagctaggatttattggtagaaacggacgaggtaaaacgacattctttaatttattgttagggaattatgagtatagcgggaaaatccttgcttcagtagaattcaattacttcccctactctgtttcagataagaacaaattcactcatgaaatccttgaagaaatttgtccccaagccgcagattgggaacttctacgtgagatatcctatttaaatgttgatgctgaggtcatgtacagaccatttaaaacattatcaaatggggaacaaacaaaagtgttgcttgctgcactgtttttaaatgcgggtcaatttctattaattgatgaaccaacaaatcacttagatacagatgcacgaaagatagtctccgattatctaaggaagaaaaaaggatttattttaatttcacatgacagaatctttttagatgggtgcattgaccatatcctatctattaatagagcaaatattgaagttcaaagtggtaactattcttcttggaagttaaattttgatagacagcaagaacacgagaaggctacaaatgagcgtctacaaaaagacatagggcgattaaaacagtcttccaaacgttcagcaagttggtctaatgacgtagaagcttcaaaaaatggaacgaggaattcaggctctaagttggataaggggtttgtaggacataaagcagccaagatgatgaaaagagcaaaaaaccttgaatcaaggcaacaaaaagctattgaggaaaaatcaaaattactaaaaaatgcggaaaaaactgagtcattaaaattggaacaattgcaatttaaatcaaatgaattggttactttagttgacgtgtccgttaagtacaatgatcaaattgtgaatgagccgattagcttcatagttgaacaaggtgaccgaattgtacttgatggaacgaatgggagcggaaaaagtagtatcctaaaactaattctaggacatccgatacagcatacaggcttagttactttaggtacaggactcatcatttcctatgtccaacaagatacttctcatttgaagggatcactatcaggctttattgaagagcacaagattgatgaaaccttatttaagtccatcctaagtaagatggactttgaccgaattcaatttgaaaaagatatatctcattattctggtggacaaaagaaaaaactgcttatcgctaaaagtttatgtgaaaaagctcatatatatatatgggacgaaccactaaattttatagatatctattcccgcatgcagattgaagaacttattcaacaatttaatcccacaatggttattgttgagcatgataaaatatttcaacaaacagttgcaacgaaaactatatctatgtagctcaaaacgaatacttgaaaatataatcattaacttgagtccttgaattataaaaactttaatgaattgataaaaaaagcctaatttctctacaatacattgagaaattaggctttaaatagtaataatagaattcataaacactgaataatttacacattaggtttatctgttaatgcagtaacaatcctgtccactaagttttctggcatccattcatgatttgtatcattcgtttcatttggtcctaaaaaatcaataaactttttaaactttggaaataaaacaatagaagtgatccaatgtattgtatgatttatggagaagaaatgaaaaactccttgcttttcaccctcctgtaatatttcttttaactgttcaaaattacctataaaatatggttgctattttaaatgccattcacgcttaaatataggagtcttcttggctaaaatgataaaaataagcacatcttgttataaaaacagatgtgcttattttttaatttctatgcatttttacgttttaagaaaatcactccaccaacaattaacagtaatgctcctgcagccatagagatccaacttgtaagattagtacctgtttgcggtaaccatccaattttagattgaatttctttcttaagttgtggttgttcttttacttgctcgttaggttgctctggtgttggcgtatttttacctgaatttgggtgttctggttttggttgttccgattttccctctttaaatttcactgtttgtcccttatcttcaatttcagcgtgaatagctactaatatattatcttgatacagttcttcaaatactactacttctttaccttgtaatgcagaagcattgaaagtgaagtctaatgtgatagaaccattcttctctttagcagtaaacttagattctactgttacttctttaccatcaactaataatggcttgtttgttgctttatccactagtttaccttttactacgtactctttacccacgattaagtctttgtattccactttatcttggattgttacagttttagaagcgtctaactctttagaaccatcagctttatttgtagctgtcgttttaatagaaggctctacaaatcgaactgtttgacctacatcgttaatatcagcgtgagttgcaattacttgcccttcatgtaataagtcttcgaacacaactacttctcttccttgctgttcagcaccaacaaaagtaaagtctaatgttacaaaaccgttcttttcttttgcagtaaatttagtctcagctgttacttctttaccatcaattagtaatggtttgttaatagctttgttcattaattttccttttacagtgtactctttaccaacaactaagttagtgtactccactttatcctggattgtgatagaatcctttgaatgaatctcttttccaccatcagctttgtttgttgctgtcgtttttactgatggcttaacgaacttaactgtttgacctttatcattgatatcagcatgtgtcgtaacaacttttccgtctttcagtaactcttcgaatactactacttctttttcttctaaaccagttgcatcaaaagtgaaatctagtgtaatagaaccatttgcttcttttggtgtaaacttcgtttcaacagttacttctttaccatttacaacgaatggtttattagtctctttattcattaatttaccttttaaagtgtactctttacctacttgtaggtctttgtattccactttatcttggattgttacagacttagacgtgtgcatttcttttgtaccatctgttttatcagtagctgttgtttttattgaaggaatcttttcatccttgacaatgtgtttaatgatttgatcattctctttaatttcaaaagagaacgtttcttcatttaatacataaccgtttggtgcaacagtttctttatatgtgtattttccaaatggtaacttttcaaatttagcgattcctttatcgtctgtttttccttttactacttcttttcctgcttcgttataaatcgtaaattctgcatttggaagcttgttatttccatcagctacatctacctttgtaatttctagatcacctttgataagatgattaactgccaataactcaataacctttccatgttcctttatttcgaacataatcggttctttaacaagaacgtaaccatttggagaagccttttctacaaatgaatatttaccatacgctaaatctttgacgttaatctcaccatttttatctgtcttatattccccaactacttttccacttgcatcttttagctcgaatgctgcaccttctaattttttactaatatcttcattatctacttttagtaattttacactacctttcacttcggtattttccactgtaaaagtaagtgttttattgtgctctttaatttcaaaaggatactttgttttatttccaatatatccattaggtgtttttgtctctaagaaataatatttaccatacgtaagatcttcaacgtttgcaattccattttcttttgttactacttttttcacttcttttccatcttcagtgaagactgtgaattcaacatttggtaaaatctttcctgaatcactaagctttttaatttcgatgttaccttttactttgttatttactatttggacagctcctgtttcccctgtcttaacttcaatagtttgtggtttatcatctgaaacatagcctgttggtgctttaatttcttttaatgtgtaagtaccaattggtaagttgtttaattctgccataccatcagcaccagtcgtgatttttccgactgattcattatttgcattaaagacctcaaatactgcaccagctaaaacttctccattttctccaacctttttaatttttaaagaaccagctgcttcccaatttactgcaagatcactactaagcttttcttcatttctctctaatagtactgtagcattctgaacagtatccgtaccacgataagcaattgcttgaacttgagttaaattagcagcaacacttaaattaaattcacccgtttttgtattcttaggaatttggatacgaaatttttctccaactgaaagctgatctttcacttctccattttcactaacaattctaactccattaggtgcatttttcgctactaccttataagaaccactcttagcatttgtttgtactgaatatagatttgtttcgaagaattcaccctttaattctgctttttgcttttcagcaggaatcacattcataaaaacatcttgagtctcttcactattgttagcattactaataatagccttagctgctttttcaacatttttattctcatgttttaattcatttacatcgagttgacctaatgcattccaaaccgcaagttgcgttgcataatgcgcttcatttttattagctactcccagctgttcagcacttttttgcgggaaaccatttaataagactctatatactacattatctgttttccccatttcaggaagatcttcaccatttggtgattttaatccaagggttaagcaataagcaatttgaccacttgaatttttaatcatttcagtgcgaatgtacttacctagactattactataactccagtccattgaatatttctcatgcgtcataacctctgcactagccctaggtaaaaatacattaaggaataatgccagtactgataataatgtaaaaactcttataatgactctcttacccaattttgtaacctccctaaaataaattaatccgagtatatatcgcaatatctaaaacattcacgatcgacccaattatcattataaaacaataaattacaaatattaaataattttaataaaatagtcaaaaaatttacacattttattatttatcaagttttttaacgaatttactatatacaaattctaaaacacgcctacaatttaaaagacaaatatgtatgttaaatatataaatagcaattcctttactccagttattaagctttcccctattaaaaatagccttttcattttcttgttaacctgagtaatttatacacctcttttaatctattacactccttcatttaaatataaaggtgacttctcgttcaaataataaagtgaaactttaatccgcccgattcccacctaacttctttactttcattgaatttttgtgcgggagtcttactgcccaaaaataacgagatatattatgcaatattgcatttgataatcattttcattgtaactataatgattacaggattactattaatctaatattctacatggaggttttattatgtttaaaaaaattattgtatcttctatggcgcttactatgttcggtggagctgcaactatgctagaggcacctactgctcaagcagcttcttataactcaacgtcatcctcttactttgatgtcactcctgaagaggctgtggctttctatcaatctcaagactataaaaaattaaaagtatttttggatgactttgaagctagaaacccttatactccaggtggaggctacgctcaagggagtgtacgtatgcaaaaattcaacgatgctcttagagatgccaaattaacaaatgtctaccaagaatttattagaatctcatactacaatcattatccagaaccaaaataataacaacagattaaatgtttattatttctataacttagcctaattttaaatgtataacctaaaaataattactaaaaaccactcatataagggtggtttttctatttccccatataatttagcggaatgttacatcatctttattttaatatcttttatagtagacattctctcgttgacacaatctagtaggttagcaatggggatatcaaaatatatttataattattttctgtttaatagcaaaaaacgaacaccctctcacaattagataaggtgctcgttttcatttttatcggtaattctcaattcattttagcttctttccaataagcaaagattaaattaacttaaaaacaaagcgttttaaatttaattcacagatcttactgaaacttggaattgccccttagaaccatcatcatttgaaacgtaaattttatatgttccattcggtaatggagataaagcattccgtacatttgtaacattaatttgttgttctccaggttttatataaccaccaacaattagctctgtatttggaccttttacactatatcccattgtattttgaccattatttttcatagagaagcttaagtcagtactcccatcatatacgaaagaagtttcagcctcgccactataattcattgtttgggttaataataagtctgcagaaacatgttcaactacatgaattggatcattcgttttgtgtacttcttcagcataagtattattccctaacacaccaagtgttaatgctgaaactactccacaactaagcactagtttatttaacttcattttaagttcccccttgatgtttgtattctattaccatcatacatccttttttaagtgcgtttttatgtaataattcatatctataaacctatatattttaacttttcgccttaatagttattgagaaagccccatagataaagctacaatattacacttcataaaaaacatgtaaattttaaagtctttttctaacaaagttttatacgagtaagtaccaaaatactcaaataaatagcatttctatttcagataaaatgtactaataaaatttttctaaaatttcactttgtaatttgatatattccatgttaatataacgaaggctacaaaacaggagtcaccacgcatatctttttcacagaatattcatacttaaaaagacttattttatcagtaactcaatccaaatttcacctatacaaaagttagtttatgatttcatatgtacataaatttaaatagattttttatctattatttttttctattttccttatcaattttaatacgagtaatataacagcacttttcaagtacccttccttttttagataaaaagtctactaatactaaacatctatgtccaactcatacataattctacttacaaactatcggagatgcaaaactatgggaatttctactcttttattaaatacctttattataataatttgtatccttagctatcacgtattttggctagagtttaaagaaaaaataacatgtaataatatgttattttctatcctttcctccattgctattattttttgtatgacttttccttttcatttacatgtgggatttatttatgatttacgttttattcctataatattagtttttctatatggaaatacaaaaaacattgtttttataggaattttatatctttcttaccggttttacttaggcggaaatggcgttcttccatcatttattatctttactatcatttctgttataacaatgctctttcgttacttattacctatgtattttaaagaaaaaaagatattattaagcttacttcttattttagtatgtacagcttccctttctatttgcggtattgtaactcaaataaatacaggaggtaaaatagactctactctcatagaatttttattaaattatatagtcattaatattttcacagtattattatcagtttattttatagaggaaatgattgagaaatataaaatgaaagaaaaactgcaacgagctgaaaaattttatatagctagcgaactagcagcgtcaattgcacacgaaatccacaatccactaaccacggtacatggattcactcaattattaaatgaaaaacatgcctctaagctatctcaggatcaatacttagaaatcatgttaattgaaatgcagcaaatacaatctactattaataactatttatctttaaccaaaccacagaataccctaaaagaaaaaatagatattaatcacattttaaatcaggtgaaagatactatttcaccactcgctctatcatacaaagttgaaatcaaacaaaatagtacagattccttttatataaatggggaccccgaaaaattcaaactctgtctaaacaacatcatccaaaacggaattgaggctatgaaaaatggtggattattacaaataaatatacaaaaagtaaaaggaaatatcataattgatattattgattcaggaattgggatgtcatctcaacaaataaaacgaattgctttgccattctattcaacaacagaaaaaggaactgggcttggtactatgattgcttatagtattattagagaattaaacggtgatatagaaatagagagtgaattaggtaaagggacacgcttttctattagtatcccttgctaatgtgataacaattttctgtttagttaattacataaatgaattttaagaatcccgctagctagcttacttattaattatcttaaattcatatgcgttaattaaatataataaggatcagagcctatctattgttacagatacactctgatcctttagtttaattcaattaaaaacacttaatatttataacttttcttacatcgtgatgaaatactagttcatctattttatcttatttactgattagattggtttaatataaatataacatctcgcgacacttaatttgttattatcattagagacattgcctgcagttgttttttcattaaagtacagacctttttccattcattgaacaagataactccccttttactacttcacttccaccgtataattccctgtccccccgccatactgatacacatgtaaataatacttccctggatacgtatagtaactacctactagtttattcccttgttgctgagcatacgtaacataattatttaaatctgcttcagaataaagtacccagttcattccaatattattttcattcgttacgttaatttgaaggtttttagcagtctccacattaatttcaaagaaatcacttgtatcgccatttcctaaactagcacgtaaaacttgatttaactgcaatttgtttgctgtttggaatgagttattcggttctttttctacactgttatcttctttcttttgaacagttacagtcgctgtagcagtattagttgctcctttatcgtctgttaccgttaatttcgtcgtatacgttccttcttttgtatatacgtgagttggattttgctcattacttactgctccatcaccaaactcccatttatacgaagtaattttcccgtcttcatcttttgatccgtcgcttgtaaatgaaattgcttcatttacatttccgctatacggaccgtttataactgcaactggtgctttattctctgcaccttcttctgtattaataccgtggaacacaacatcatattcaaattgtcctgatgtattcacgcgataatttacaaagtatgctgttactgttttatagcctgtccattcctttgcacttaaacgttttaacgtatcattaacgttttgtgtaattgttttccaatcttcatattctccttttgctgcagttcctgtatatgttccttgtagtgtgaatgtattaaagaactgtggtttatttttcttcactgatacatttttcaattttgcttccgctgttatttctgctgcaatatctgaaactggcttcgatgcatgattcgctaaataatcgtctgatactaatggcacattatatttctcacgattatcaactagcatttgcatatagtcctgatattctttatttaaattcgcatctttacttaatgtagagcgatatgcatcatatgctgttacatcatttttcctaataagatcatgtattttatcgaacatatcatatctcttattgtacatatacgattgtaaagcaaaggaataattatagaaatcccacgttccatactttgcatttaacgttcgctctgccgtataacgctctgctggatttgaagataatcctcctataatactctttctcggtacaacattatccgttctcgttgcccctgcaaaaaattcagcatttccttcttcaaaccaagataatctttcattttcatatattttcccttgtccccataaccctggtacttcatatctaccttgtaaataatgcgtgaactcgtgtctgaataattcttctaaactataaatactttcttctggcgtacgctcataagtaaagaacgtacctgttccttctatataaagaccaccgttattcgtttcataaccgtacaattgacgattaaattgatattctgctgggctattataaataaccatcgttaatacatcatcaggatttcctttttctaaaggttgatcactttcaaccgtacgatggaattgtgcctttacttcttttgccgcccaatataaacgttttactttttcttctgtcactttatctccagcttttaaaacaattgctccatcatcaaacgtatacgtttttggcaaatattttttctttccatcttctcttatttgatctaaattcaccactttaccatttgcatcttttccgccataattcgttgcaatttgctcagcagctacgaaatattgctcccctaaatacggatacattttcatcgcatctgttacaacttgtaaccctttagttcctgtactatggaacataccgagtctacctgtataataaatgccattattaataagccaaccgttttttgctgtaatcgttcccattaatgcaaaacgacttaattcattaatataactatctattttctgataccatactgtatctttcggtgctttcctcgtatcgtacaaatacgattgaatgtcgtaatcaacaccttgcataatatcgtaaatagcatttccagctgaaagattatctactaatgtagaaaaattatcattatattgtttaaaaatctttgcagccgatgttatcgtttccacatcgctcgaagcgtttcctattaactttccgtatgatgataccactctattttgctctaatgtacccagcttaaaatttgaattgttagccatcgcttttaatgcaggtaagcatttatcatgataactccgttcatttaatttactaagttccgaattataaaatcctaaataaaatcctgaacgtaatacctctactaatgtctcaatcccttttgaatcatccttcgtataggcttgtccttgctgcttcaatttatcaataatcgtctgcatcctactatcattttgatagaatgctagactgtctgtattaaactgaaatagccccgtaatttgctcccaatcaattgttacaagtaaatctactaactgctgattgcttaattgatttaattcggcaattgtataagttttcgctacagctaattgcttactttcttttttcacctcaggtggtctttgtgataaatcggcaaattgtaaccttttctcaaaagacttgctttcgagcactttcgatgaatgagctaattcttgtactggtagttgtacaccgactggctccattttgagcacatttcgataagaaacttgctctcccttagtatcttctgccaaacttaccccttgaaaactccctaacattaaactagcaaaacttacccctactaacattttctttgaatagcctttcatgctctcccctaccttacatttttagtgtcccgctccattattttactatttttactttttgtcctgtattgagaaaaaataaggtaacgttcacacatgtatccattccatataaaattaacgcttgactttccgtgcattttatatcaaaaaaagatagataatagcaaaattcctgctacatctatcctcgttttcaacactatgattttaactttataaatgtaacttccggtaatgtttgcatatgctgaataaactcattcttttcttctgacgatatatttttcagttgcatccctaccttataaacagtttctgtaccttgctgtgaagcttccacctcatatgagagtattgggatgcctttcacttgtagtgtttctaatatttgttgtaccgcttcatgtttatttacaaacatttgcactgttatattttgtggaaataaaaattgcaccttaaaaatacgacttacaatttctaaaccaattaaaacgagaatcgtcgctccaatgcctactacatacattcccgctccaattgctaatcctatgccggcagtagcccataaaccagccgcagtcgttaatcctttcaccgcctgcttttgaataataattgtgcctgcacctaaaaaaccaactccactaacgacttgtgctgcaatacgacttgggtctagagatatatgctcttcaaacacaatatctgaaaaggcatatttcgaaacaaccattattaacgcacttcctaccgctacgaggaaatgagtctttaatccagcttctttcgatcgaatttctctttcaataccaatcattgctcctaacaagccagcaacaccgattcgtataataaaatcaaaatctacactcacgggcacttccccccttcattcattatagatagataaaacaaaaattatcacaaacatccttttatttacatgtagggataccgctaaaatatacttaatactccgaccgttttatgttaatattttaaatattaacataaaataaataacttctaattttaaacctccactaattttctaaaaaaacaaagatggattacatgaaattaggttgagaaattatagaaaacgctttcactttgtatcgtaattttttataaaaactatataaataaaggagcttactaacaatgaacgtctcattactcacacctactactgatttacaagaagaatacttagatttctataacgaatggaaagatagcggtgaaacaatgatcccgtgggttatctcaaaaaatcctgccaacttcccagctatggttcaagaacttctcgatgcgcataacggaataaatatccctgaaacttgggtaccagactctacatattggcttgttacagatgaaaataaaattgtgggagctgttaatatacgtcatagtttaaccaaacatttatttaacgctggcggtcacattggttatggcattcgcccttctgaaagaagaaaaggttatgctacgaagttactagcattatcattagaaaaaacgaaggagttagacatcacgaaagtacttgtcgtttgcgacgctgtgaataccgcttctgaaaaaacgattttgcataacggcgggattcgtgatgatgatttcactgaggaagatgggaatatagtaagaagatattggattgagctatgaataattacaaataagcgagaaagtgattatacactttctcgcttattttacactgcttctatttcaaactgcactgtaataccacttggatctaccaccacaaacccatttgtagtttcatttatttcatgttgtttttctattaatctttctttcacttcgtctaacgcttctttatgcggtagtacaatagcatatacctttagtccagttgcatatactggtgggtgtggattgtttactccgttccacgtatttgcaccaatatggtgatgatatccccctgctgaaataaataagcaatcctcttcacgctgttgtacttcaaaacctactgtttccacataaaattcatgtgatttctctacatcagctattcgtaaatgtacgtgcccaacgacagtattagcaggcaaaccatcaaactcataatcaacgagtgtcgccaattcttttaaatcaagtggtgtacttcctcctgacccttctccccattgatcacgcggacggtctgcataaatttcaataccattcccctctaaatcttgcaaataaaaagcttcgctatatgtatgatcacttgcactattaaaccttgaaattggtaaaatttcatttgaatatgtataacgcccttcttgctcatccgggctgtcaattacattcttattacgaagaaccccaaatagcgcagaagcaaaagcttcacgagtcggaactaaaaaggctacatgatatataccagtcgtacgcggttcttgcagtaccccgtcctctagcttttcaagaacaagtaacgcgttctttccaccttttccagataaatatgctttattcccctcttgcttaattacctctaatcctacaacattctcataaaaagcaatttgacgctctaagtctttcactttaaattcaacatgaccaatacgtgttttcggatgaatttgtaccatgaataactccatctccttatccctatatttttccattacatataaccgttactatgaaggatacaactaaaatcatcctatgtaaataagaaaagtcagaatttatatacatttttattttcataataaaaaagccaccttttctaaatttcagaaaaggtggctttataactcttatctcattttatgtacttcagcaactagctttccaccctgaatgcccatataaagcttcacaggtgcatcattcgtattttcaaatactaaatctaaatatggatatgcaattgtagcatctcttccttgtggaacataacctaccgttttagaatgtgtagttctctccaccattttcaggccagcttgatctgctgcattgtataaagttgaagatgtttgacaaacaccaccgccatatccatctactaatttaccatcaactatttctttccctaattgatatcctttatctggtgttgtatcaccgattaatgaattaaaagagaaacggtctccttttgctaacacaactccatttatgctcgctgctgacaaacgaatattctcaatacggccacctgttgaaccacctaagttcgtttcatatctaccaattaccgcaccatttccttgcgcatcacttaatgttgcgactggttttttctccacgatcggcaactgatacgtagcatcccacataccaacatttaacaatttatctactaattctttttccattaattcataagaaggttttccttcttgccaacttccatcaggtgctatacgtgaaggaaccatttttttgtcgacgctttttccaatctcaccaacaacctttgtgacagactttttaaatttcgcttcatcttcaaaatagcctaaactagataaatctaattttttcacttcagtaccagttcgaccatcaactaaactaatagtatcctgtacttctgctttagcctctacagtgtgcccaccaatatcacttaccaatgcaacatcacttacttttgcaccacagccacttattatagctacacataacaccccaactaatataccctttactttacggaacaatatactctctccctttccccaacatcactattatgtatttatttcatttttatgtatgttttgttacaatcattttacaatatgtttataaaatgttacaagttatttttcactctatataaattactcttttcttttataaatgtctatacatatttacataaaagtttgagtttgatagaattgtaacttttatgtaaactctcccttttatccagtatataccattacacaaaagaaatacaaatcaaaaaccctcaagctattttttataaagtgaaactgtaaccagtgggggtcttattgcccagcaaatagcgggataaagagaaatcccgtcaacataaataggtatttgccgtgccaccgctccgcttttacacatacattatggtgaattcaacctattttaaagaaatggaggatgttattatgtatccctacaatccatatgatccatataatcaatatgcgtaccaacaaccacagtatgacttacaaacacaatatcaatcttatatagatcaagcagagcacacgaatccatatgaccaaaatagacaattccaacttccaatctcttttcctggcactggaaatcgtcaattagaaagacgcgtaaatgagcttgaacaaagagttcgtcaactagaaaatacagttgagcgccatacacgtagactaaaccgcttaaaccaacgtttacgcacagtagaaaacagactaaacattccattcgcagcattagaagacggattttaatcgagaaaataaagattatataaaggaaggggcttccccttccttatataaattgacgaaagttttttccatctctatactgataagagttaatgaaatgaaacaaggtgataaatatggattttgaaataaattatctttccttttatgttgtacaagtagaaggaaaaggtgaagcagttgataaacgctacaaacattttcaaactttagacgctgaagaatatgaagatagttccttaaaagaatttttgaatggtgagttattaaaaatatcgaagcgaaaagtagaacgtcatgcaaaaacagaacaagccccaacaaaaattggtcgctttattgtagaagaagggcacgaacttgattcaaaccctcattacaacctttttaatcgtattcgctttgcagaaacaaaagaaaactttaaagatatgagcgaacctctcgtttatacatatcttgacacaagcgctgtacgtggtggtgtatttttaattgctcaggcaaaactacgcaaatactttgatgatccattcgtattcgtaatgaaatgcgactttgaaccaaaggttgcttctatttctgatgaatcaacactgattcgtaacgttgaaatggccatcacaacaaagaatatgaaatctatccaatatccgtacatgcctgaagaaggaatggttgaagtaggcgaactaaaaatacatcaagcatcacatgcccgctactttgaagacttcttaaaattcgtcgaatatgaacgctctatgcctgaaattatgaaaacacaagtaatggacatggtatacgaccaaattgaagatgtatttgaagaaggtacggaagaacgcgaacaattcgaccaagcgatggaagtatgggctgccagtccgaaacgcgaaattatggaacaattttcaactgaagaagtaatggaagcaaccgctcaaatcgtcgagcatgctcctgaagtggaattaaaactaaaagccgatcatatctctgtgaaggcgttgcttgcggattttggggatcaaatacatattgcgaaggtaaatgatcgatatgtacttatgattgaagcagacacacttacatttgaaaaaggcttctctcctattgagtttctgaagccagatgagctgcaagatgtgattgagcggattgagaataagcagcagtattcgtttgatccgagcggtattgaataaagtgaaactttaatctgtggggttttgttcatcccccactaattattagccctcaccaatcgggcttttacgggataaatacttccatataactgttgttactgggcgcttttaataagcgctcttttatttatattaaaaaccgattctactaagaatcgatttttctgctttataataaaacatgtttatttttaaatttttttgatgcaagatgacatttgttgcagaatcaaatatatcccttccttgttatacaggcttatttccattagaaatatctacttcaatatttctagttgaccaagtccttctataagttgttaaaatgcaaatttcactttactacctcaaatttattgtactcgtaaaaagataattgaaaacgatattccggatgttctctcacccaatcgtaggcttcttctaaaatttccattttgttttgcaagtcattaagttcactacattcgtcccttttctgtttgcacagagggcagaatccattcactatttccgcactcgtcgccctaatagttttactttctaaatcaactactagacgaagaataacggaatgctcttcttttgtagtcaccttcatttcagcaatccgatcctcattccaaaagacaccgtttaattccatctttactgtgacatctttaatatccaagtctaccactatcatacctcccttgtacaaaactcaatcttactcttctattttaaactttaatacaccacaacttaaagagatattaagttttttccaattcttctttactatgaaagaaagtgtagttaatgctaattgtgtggtaaatattatcccaaaaactaaaacagttaaaatgttaaagattgtttccattaaactacactcttttctttatatatatttttattttattaatacagtttaaaactcttattacgtcttaacactcccaaagcaattataatgtacaatcacaacaacaagttgatgcctatttaatatcaatacgctgttattacatgtatgtagttagagatggaggagcaattcatttaacctctgtattctcctccatctcagccaaatacctaatctgtcgttccgcttttctcactgctgtacgaaaatgttttttcaggagttctactgtattttcacttatataatatctttccgttatactttcccacgtgtcaccactttcaaatgtactccattcaaaagggcgttctgtatttttctttagttctttaaacacccattttcgcatcttttttttcgctttttctgttatttttccgttttttacaagttcaagttcaccatgtcttttgtatcgcttattaatatctctctcgctatacactttaagaagtatatttgctgtattttcagcatctgctaaagcacggtgctgttttccttcccacgttaaagcgagctgttctaccgcaaattgtaaacttggcgtatgttcaaacaattcctcatatgcttggaaaacaaatttttgcaaatcaattctattttctttttctatacttgggcattcaacaccatataatgtacaatcatgagatagaaagcgataatcttcttttccccatgaaacaaatatagaaccttcgccgatgaactgaataaatttctctataatttgagggaatttttctacacccattaaatcttttttcgtaataccggttaattttgttgtatgacgagttaatcgtgcacttggttttactaactccgaaaattcttcaattatcttcattgtacctatttctatttttacagctccgatatcaactatttctgatggatcttctgatttatacggtctgaaattcctttcaatatcaaacacaatgaaatgtgtagcgtttttcaatttatttacctctttctaaattgcttttcacacaaacactttattttcagtatttatttattcatgtactttatacaaaaatactccgaataaataaatgaaaattcagtcttgttatgatatgtaagtaggaggacatctataaaagtgcaaaaaaaaagaagggcgagcccttcttttttcaaaaattacttcttgtttacgttagtagcttgaggtccacggttaccttgttctacttcgaaagtaacttcttgaccttcttctaaagttttgaagccttcgccttggatagctgagaaatgaacgaatacgtcttctccgccttcaacttcgatgaaaccgaaacctttttctgagttaaaccattttactttaccgttttgcatgaaaaaaatcctcctacaatgtacctatatgtacatattcattttcaaccaccttacaataataagccagatattaaaaaactgcaacccctgaggagatttaacattgctatcctcctcggaagttacagctcatttaaatctctatattattaaaagtaaaatggtttaaacatactatatcatatcaatataataaaagtaaagttttttcttaaattattttttgttcccactgcattgcttttaattcacctgatccggctactacataaccctctttttgattaacaatgcgccatccgtgccctttaactgaatcacatactgtaacaataccttcttcaagaagcacacggcacacaccactaatacccgccttattttgcgttgaagttgtatataaaacatgttgatctacacttaagtctaaataactacttgctttctgctcactttgacatgtgtgccaatatattttttcacttgcaatactttcatctattttacaataagaaatattcccgctaactcccttgcacgatccacttgccgctactaaataagaattgtgtaaagtcaacgcggagatcatttgattcatcgcaattttaatcctctttaatttacgtgtcttcaaatcaaagagccaaacaccaccatatttagcatgtattttcgtaccaataaataagtaatgtttatataaaaataacgatcgaatagacggtgccgcactgccatactcaagaaacggatgaatagtttcccatgtcgaaccgaaattattagaaagatacagcgttttttctccatgagcaacaacatttccttgtacattgctacatacattccaactcgttgcttttgttggaaaacgctgaattgtccagttctctccaccattcatactacgaataaaaatcccttcgtcacctacaccataaactacattatcttcgctatgtaaatccctaattcgtttttgaaaaccatttaaaattcgtttccattctccgtcttgttcaacaaataagccattatatgtagtagctaacaacagttttccatctcttaactttgtaatagcagttacacttaacattgtctccacgttgacactcccattcttagaacttctcagcaaatacaattgcaaaattactgcatttttcaacatcctcttcatcttctggagctaattcaatttttagcccttcttgtacaagctctgcaccgcgctctacaagacgttcttcaaatatcgttaccgcttcacaaaacagttcatacgctgtatcacccgatccgaacaccgctacctttttcccagctaaatctatattttctaagtcatcatgaaaatcttccgcttcaaatggtaattcaccatcgccccacgtataagatcctaaaatgattccatcataagctaataattcttcagcatccatgccttccatttcttgcaatactacttcatgatcaaaagcatctaaactaactttaattaaatcagcaatactctctgtatttcctgacatacttgcataagctattaaaatttttgccactttggcatccccctctaacaataaatgattctcattctcattatattaataatgagaatcaatttcaattgatttttttctacttttatttacatttcacatctgactatttatatttcattttaaatatctacattcatattcaactattgccaaatctatcttcaaacattattgtattatcatcatttcacattacttatttcaaataaaaaatgtttttgtatcatgctcaatctctaatcaattgttcactttacagaaagaggagtccttatgatgagaaagtattttattagatttttaaaagcaacctcccttttaacaatattcttactaataggagctgctattattttattcggtacttcatacggtcataatttacgtgttatcgcagccgagagtattttaacttctcagcatccacaatatgcaaaattcacgttattgtctgatgaagaattaaatgatatttctcaatccatcacaaatccaaaatggaaaaatagtgaatttttaacttctaaactttcaaaaaaagagttagaaagacgaaaagatttaccactagatgtttctattgaaacaataaagaaaaaatataatgatcattttttcgaagggaaattaatgacaattagtaatccattcaacgtaaaacttgttacccagcaaggttcagaaggtaaagacgtcggagaaaaaatatacgtaatggcaaagcgaaaccatgcagttgccgctgtcaatgccagtggtttttgggatgaaaccgggcatggtggtggtaaaaccggaatcggtattgttattgaaaacggtaaagttataaacacgccgaaagatattaatacccctaccctcactagtggtattacaaaatatggacaaatggtttctggagagttttctgctaaccaattgttaaataaaaatgttgtttccgctgctggatttatgcctcagctaattgtaaatggagaaaaaatgattacaaatgatggtggttggggatatggccctcgaagcattatggctcagaaaaaagatggatcgattatgtttttcgtcattgatggtagacaacctcatagcattggtgcttccttgagagattgtcaagatattctttatgaaaaaggtgctgtcaatgcgatggcaatggacggtggatcatcagcaacattatatgcaatgggagatattttaaatatcccttccaccttatctcataaatcacgctatttaccaaacgcatgggtagttacagcgaaccctaagcaacaagttcatgtaacaatagacggtaattctgcgagctctcaaaaaatttctgaattaacaaggacgactgctatagctttcaataaataaaaaagcacagatgactatacaatcatctgtgcttttttattactttttaaaaataccaaacggctttccaactggtaaaacaacttttccgaagtgtgtgtttaacactgctgctgctgaaccatagaaagataataatgaaataagaagttcagaatatgctgctaaattatgcattgcatgcggcataacacctaaagtacttaatgaaagaccgataaataagaaatcaataaggacgaaaatcataaataatactttatgtgtttccattgcaccaattgtcataaagattgtgaaaatcaaatatccgataaaggctacaccaagctgttttgaatctgcagcttgtgctaatttttcgccaaatactccaagttgaattaaccaagtcattccaacacctagccaaaatagaccgtacgcaccgaatgctgttgtaccgaatgtattgttatgctttgcatcatgaatgcaagcaaagatttgtgcaaatcctcctaaaaagattgcccacggtaatacaagtgaaacgccatctgttaagcctaacttttgagatgatgctacaagtgttaccatcgctaatccaaatagaccaattccagatggatctgctgttgtcattttcacatgatgtgtagtagtttgattgctcatataaacctcctgattataaacatactcgaatacaatacttaaatcagaagcctatgtcaatggtttttttgtatgttgtcagacgttatattttataatgattaaatatatttccgaccacttcataaggttttatattcactttttccaactcatttatcggtagccataacggaatataacttcctctaccttcccactgaaattcctcagctgttccacttccgaacactccgcctgtaatataggcagcataataatattcattccctttatattttacctgtgcaataaggtgctccacttttatatgtacccctaattcttcgtatacctctcttttcgttgcctcttcaggcgtttcaccttcctcaatccctccgcccggaaacacataatatgtttcctcttctcgaatacgttttataagagcgatttttccttcctgtacaatgatagccgctccgcgatttcttatcattttattacctcaatacaaatcgcaactgttccccactctttttcttgttctttcgtatatattttgtatgtactttctaacatttcctctaaactatcattttcacaatccaataattttttatcgatttgttcatacatggctttaaagctctcgtatcgctttatttccgttacttttaccgtcatcatttcttttgtcgtaagattcgtaaatacgatttcatcgcctttgtttattagttgacgtttttcatcgtataggcgtacttcatatactttttttcctgattgaattgactgaaacggtttattatataaacccatttcgtatcgcatacatcccactcccttttgttcatttcacctattaatacagttcacattactacatcttgcatataatattccatacgtatcacttaattgagaaaggaggctgaagaagcatgttatatttaaatcaaaaacctgaatataataaatatgatattggtgattatacttatagtaaagtagggccaaccattttttcttggaacgatgaaacaaaattaaaaataggtaagttttgttcattagcagaagaaatcgttttcatacttggcggtgaacatcgcgcagactggataacaacttatccatttaatgcactttttgatgaaggagcacatattactggtcacccttcttcaaaaggtgatatcgtagtcggcaatgatgtatggattggttatcaatcctgcattttatctggtgttacaattggtaacggggccattatcggcgccaggagcattgttacaaaagatgtacccccgtatgcaattgtagctggtaatcctgcaaaatttgttcgatatcgtttcccccaagaaacgattgacaaactagagaatctcgcatggtgggactgggacatttctgttataaaagaagccattccattactactctccgacaaaatcgacgaatttttcacctcacccgaaaaagaatctacatgataaatacagaaagagcatccttttttccggatgctctttctgtatttattttttatttatttgcaaatgattacacggagaacattgaaaaggaattttccctaagcaattaagatttgtttcacaaatttgttctatcgttggaacaaatggaatgacaactatgttactttctaccatttgtgtaacaggtggcaatactgtgcctacttgatgttcgaaacgaatactcgcttgatttatataatttcctgaaccatttggcgcgctctgcactactacttggaacgaaactgtccgtgcttcacctggatttaaatttcctataataaaacctgatactgggtttacatttggcactggcgtattatcaatcgttacagttccaaggacaaattgaacactactatctaacatatcttgaaaacgaatattttgtattgctgtatcccccgtatttgtaataactgtcgtaaacgtaataacatcgccaattgttgctgcctgtaaatttgccgtttttacgactgtcgttgagacattttgaggaataaacgggataacaactgtattgctatcaccttcaactactactggcggctcattcggatttacagttgcgagcccatttgctatagcagtatttgtaactaaattatttatttgtcctcctgttattacaacttggaaattaataattgctgcgtcatttggctgaaaatcacctaacggaataccggtattcggattagcaaatggaagaggtacatcatttaccgttaccgtgccatttataaataaagtattcggatcaatgatatctgttaaaacaatattcgtcacaggaactgtactgtcatttataacggcaattccataagtgacaacatctcctaccatcgctacttcaaagtttgctccttttgcaacaaataagattgcagtatttaccgtcactataactgtattgctcgtatccatcactgtaactggcggctcccctggtactaaaatatattctgctaacgccccagcaacgttcactactgtaccaccatctggaaagctcgtaatcgtagcttcatatgttacaatcgccgtctcaccgactggaatgtctacaatcgtaaatccaacctgcggatttactcccggacgagctactccatttacagttacactatttggtacaaaaacagcttccggagataggacatcgataaattgaatattcatcgcatcagcagtaccagtatttaatattcgaaccgtatactttactgtttctcctactccaacaattgaatgatctacttctttttgcatatctaaactgcctctatttactggtgtgactgtcgtattacttgaattcgtaattgtaaacggaggttctcctggaattaattcaaaatcacccgttactcttgctgtattcataatgctattagaaggcggaactgcgattacatttacttcaaatgtaattaatacgctatcccctactgcaagattaggcaatgcaaagcctacaaatggatctaaacctacttgcggaatcccatttatttgtacacttccaggaacgaattctaaactaggtgatggaacatcgctaaactgaacgttcgtcgctgttaccgttcccgtatttgtaacttgcacactatacgttaacgtatctcctaatcgtgtcgcttctttatttacagattttataacgctgaatcgtcctctattcactctagttatcgtcgtattactcggctctgttactacaaccggtggctctcctggcactaaagtaaagcttcctgttatatttgcaacgttcgtaattgttcctgatgacgggatgtttgtaactgtcgcttgaaacgtcactataactgtttcaccaactgggatatctccaactccaaatccagtaatcggatttaagtttggttgcggggctccatttatcgttacactatttggtacaaatgacgcacctgttgaaatcgtatcaataaactgaacattgttagctgttactgttcctgtattcgttatttgcactgtatacgtcaatacatctccaactagagtagcggctctatttacttgtttaataacattaaagcgtcctctatttacagttgtgagtgttgtattacttggctgatttactataactggtggttctcctggtactaaaataaagcttccggtaacatttgccgtattggcaattgttccgtttgacggaacgctaacaactgttacttggaatgtgacttctacactttcacctggagttatatccggaagtgagaagccagtgttgggatctaatccaggctgtaacacaccgtttatcgttacactattcggtacgaatgttatagaggatggtaatacatcactatattgaacattcgtcgctatcactgttcccgtattttgaactactgttgtatatgtgattgtatcgcctactgcaacaaccggctgacttactgattttaaaacattccaaccagattcatttatttctgttaatgtcgtgttacttgtcgtcgtttcagtaataggaggctctgtttcacttacagcaaacgtagccgtaacgtccacaaagttaacaactgttccaccttgaggtatgctcgttaccatctcttggtatgtgacaagtacaaaatcacctacaggtatatctggaactgtaaagcctatgaacggatctaatcctggttctggcactccgtttatactcacacttcctggaacaaacgctacaccactcgtactagaatcaagaaattggacattcgttgccggtaccgttccaaagttaaaaattagtacatcgtaggttaatatttccccaaccgtcgctgcccctttatctactatttttactggaaaaattgaagctatattaattgtcgtaacgactaaattcgttaatatcgtttgcgtaatcggtggctcctgcggattcggttgtgaagtaaatgtaacgtcagcatcatttaatatgacttcattatcaggaatttccgtaatggtcacttggaacgttacagaaatactcgcaccagcatttaataacggactaactgtaaagcctatttctggatttaatccaggttgctgcactccacctatcgttacactgttgtcaacaaacgtcgtcccttctggaatgacatcttggaagagtacatctgtaacagggataattcctacattcgttattagcactgtatacgttaatacatccccaacagccccagttgcaatatttactgtttttattgctgtcacttcaccaggaggaggtaacggtattgtaactaccgttgtattacttgagttcgttgttgttacaggtggttgtaaaggattcaataagaaagtagctgtagcagacgctgtgtttagaactgccccaagcgttgatggtgcaacaactatcacttggaatgttactgtcaatgatgtgccagctgcaatattaggaagcgggaaaccaatatttggatcaaatccaggttgaggcgttccatttatcgttacactatttgctacaaatgttgtttctggagcaatcgtgtcaatgaaagaaatatttgtagctgcaactgtacctgtatttcgtataacaacagaatatgtgtaagtctctccaagtgctgcttgttgtacagatgaagatttttgtatagttagtctcgctgtatttacttgtgttactacaaaattactatttgtagtagtcgttataggaggtcctgccggatttataaggaaacttgcagtaacattcgattgatttcttatatttccaccactcggaacgcttgtcactgtcacttggaacgtaattgtagcagtttgcccaactggaatatttgtaacaggaaaacccactataggattcgcaccttgctgaacgactccattaatcgttacactattcgctacaaatgtagctccagatgggattggatcttgaaaaataatattcgttgcggggacagttcctgtattttgaataagaatcgtatacgttaacgtatctcctacacctgcttgtggtgtatttacactttttattacattaattgatcctacattcacccgcgtcacaacaatattactaatcgttacaattgtaattggtggctggagaggacttacttggaaatcagcagttacattcgcattattcggaagaactctatttggtggtacactcgtgattgccacttggaaagtaactgttactatacctcctactggaatattagcaagtggaaatccagttgtcgggtttaaacctggttgaggtgtcccgtttattgttacactattcgctacaaaagtggttccaactggaatcggatcaaggaatgatacatttgtcgctactaccgttccactattttgtatagcaactgtatatgttagtgtatctcctacacctgcttcagtagcgcttacactcttcattacatttagtcctgaggaattcacaactgtcataacagtattacttggaaccgtcacagtaattggtggctctgttggatttacaagaaaatctccagttacattcgcgttatttacaacattattccctggcggaatttcatcaattaatacttcaaatgaaataattacactcgcgccagtaggtaaatcatttaatgggaatcctagtcctggatctgccccctcttgtaaaacaccattaaccaatacactattttcaataaataatgtccctggcggaattgaatcttggaaaaatacacttgtagctggtacactacctgcatttataacttcgattgtatatactaaaacatctcctaccgttgccacattcgtattcactgctttcacaacttcaaagttccctgattgtactgtcgtattcacaacattactcggtacattgattgttactggtggttcattcggattcacttgaaagcttgctgttacatttgcttgatttaaaatatcttcattttctggattctgtacaattactacgtcaaatgtgactacaaccgtttgagccgcaggaatatttggaagagagaatcctgtattcggatttagtccactttgctgtactccattaattgttacagaatttgcaacgaaggaaacagcggaagaaatagtgtcttgaaataacacatttgttagcggaacgtttcctgtattttgaacggcaatcgtatatgttaaagtatctcctactgctgcttgtgttgtattcacttcttttattacatttaaactgcctgtattaacttgtgtcacaactgtattcgtttgtctattaatcgttattggcggctgattcggaataacgacgaaattagcagacacatttccgcgattcggaatcgtacctcctgatggcgtagaagttactcgtacttgaaatgtaactgtcctagtcccacctggagatatgttagcaactgtaaagccagttgccggatttgccccaggttgcgaaattccatctacagttacactatttgtgataaaagtcgttccagttgggattggatcttgaaaaataacattcgtcgcaagtacatttcctgtattttgaattgttaccgtgtacgtaagaacgtcgttaaccgttgcaaaagctttatccactgtttttctcgttgttatatcagctatattaattgtcgtaactacagtattgcttgtcgcttgccctgaaactggtggttgaccaggtactggagtaaagttaaatgttacactcgcacggtttggaattggattgacaagagggtttgatgtcactcgaacttgaaagcgcactacagtcgtttgcgatgcattaatacttccaagattaatactacttgctggattcgctcctggacgtgctaccccgtttaccgtaacgctatttgcgacaaatgttgttccagcagggatactatcaacaaaaataacattgtttgcagtgatgtttccattattcgttacattaaccgtgtacgttaatacatcattaagtgttgccgtctgtagatctacagacttttgcatacttatagttgcttgattcactgtcgtttgtactgtatttgaagaagacgtacttgcaataggaaggctaccaacgaaaggacgaaattggtaagacaccattgcacgatttgaaatagggtttggatttggaaacgatgtaattcttacttggaatgtaacgattctttgagcattatttggtatcgttcctaaattaattccactagctggattcgcacttggttgtgttactccaccaaccgttacactaccagctataaatgctgtgccgttcggaatactatcttgtaataaaacgttgtccgcacttcctgttcctgtattcggaactgtaatcgtataagtgagaatatctcctatacctgcaactgctttatcaacagatttgacaggatttataatcggtcccgtcgcatcaatttgaacaccaaaaccagccgctgcataaccatcaccatttgtaacgaaccgaacggttgctgacgtttgattatttactaatgatgatgaagcatctacgtttgtaatatcccatccttgtcttcgaacagccaaagctatccctaatggctgattcaaatctccaaacgttccggttgtatctaattccccaaagtcattacaaatttgagattgaaagaaattatttgccggatttctcggtccgaataatgcaactgtagcatttgggtttggtccaaagcgaagttgatctccagaaatgttggaatctccctcttgaacagttacgagtactcttcctgtaacagctcctgtagctggagtagcaaatcctgaaatagtagcatcaacaggcggggatgaagcatcaataatttcttggcctgcataaactgacaaattccgaagaggtaaacttgcattttgatatacaacctcaagcgtccagccagctgaacgactgattgttggatcagctgaagttcttgcagcgggcacagcacctgttgtatatgtgcctgccccacctgcactaacaagattggttacattagcagagcgagcataataaaactgatttcctactgaaccttgctgcgcggtagcgggatctggcgtaacagcaaacgtccctgatggtgttgtaaatgtaatatcatcatttaaaaatggtaaaacatcttccgtatcagtccgaaaagtaccagcccaaactaactctgcatatagtacactactccccgccggaagatttaaaattgcacttgaagaattcaattgccattcatccgtcgttcctgctgggaaccctggtacttgcagcgctgtatttaccgtagtaaatacagcaagtgtaccaaaaatattacctggcgcaggtgatgtagggctaagccctaacgtgttcccagtgaacgtgacggcaccaggtactgttgttgtaaaacggtttataaaaggcacacaatcatctcatttcatttatagtaaaaagtgctctatactataaaatgtagacaaactatgcaatgtacgttgtccaacaaaattccgcacatacgagaggagtttataaaactatgcgctacgttatcataacaggaacttcacaaggtttaggtgaggctattgccactcagttgttagaagaaagtacaactgtcatctctatttctagaagagaaaataaagaacttactaaacttgcagagcaatataacagcaattgcatttttcattccttagatcttcaagatgtacataacttagaaactaactttaaagaaatcatttcatccattaaagaagacaatgtatcctctattcatttaattaataatgcaggtacagttgcacctatgaagccgattgaaaaagcagaaagtgaacaattcattacgaacgttcacattaatttacttgcacctatgattcttacatctacgtttatgaaacatacgaaagaatggaaagtagataaacgcgttataaatatttcatctggtgcaggaaaaaatccttatttcggatggggcgcttattgtacgacgaaagctggtgtaaatatgtttacacaatgcgtagcaactgaagaatgggaaaaagaatatccagtaaaaatcgtcgcttttgcccccggtgttgttgatacaaatatgcaagcacaaattcgtgaaacagctaaagaagacttcacaaatttagaccgcttcattgcattaaaagaagaaggaaagctattatcacctgaatatgttgcgaaagctattcgtaacttactagaaactgaggaattccctcaaggcgaggttattagaattgatgaataacaaaaaggcgtgctaaaatagcacgcctttttgttttacttctctaaaaatatgagcacagattccgcaatttgttcataaccaatttcttgataaattttattagatgtcggattcgctagatcagtatataacgtagtcgtctggtagccttcatctaacatacgttgactaagtgctgctacacaatgagatgcatacccttttttccttgcttctttcggcgtatatacgaaattgactgttatattatttttagttggtctcgtttttgcagctacagaaacgagtttcccatccacttccaaaccaaacagtcgatttgtagttattaatgtatacgcagtttgttttgcttcttctttcgtagtaggaagctttacgtcttcacaaaattgatatatccactgttctattaatggtaattcatcattatttaccgctcggaaaagtccattcgcattacacttcttctttactctgttcagctcatacacaccttgctccattgcaacattcgtttttttattttctaatacggcaatctcttccgctaatttctgtacaattttcttattaccgatcaatccaggaatatccggatatactttcgttaattcttttgcaagttcctcaatagttactcccgcaatttcagaagttgcaacaatgatttgtttcttctcttctgtttgcagaaatacaaccgcaatttcttctccttgtttcgctatccccataaatatcggttcttggaccatttgtaatacacctaatatgagattgttttcctgctcattcttttctagaaatggtgtaacatcttctttaaaatgaaaaatctcttcatatacatgtaattgaatcatcgacaatctcttctctctattcatagtttaattaagtattggcgattaattcatcaaatccctcttttacgattcaataatattcaaagctaatgtattcaaagcattttcagcttgtaaaattctctgtttttccttttcaaatacatcttcttctttttgaaatgactcttttcgatttttgatcatgcgctccatctcttttttactcggtccaccgtatacatttcttttttgaataaaagcttctggcgatataatttctttccactctttttctaataaatttattttaaaatgttcttgcaagtacatatttacctctttgaagtgtaattcatgtagttcttttttctgctccaatgacatatttgcaatagcacttgctgcatgatgagcatgccgaaatggaatttcatagttttttgttaaaacatcggcgaaatccgttatcgttattgcatgtttataggaacgactttttaacgtttcttcttctactttcatcgttcggatcactgcattcatcatacaaaaaacacgaattgccttttcaatccctttatataaatatggctgcaagtcatcttccgtatcgacaatatcaccaaatggtgtattatgaatcatttgaaatactgtaaatgcttctcctaaagcactactcgtaattgcacgagcatgttcaattgaaaccgggtttcgtttttgcggcataatactactgatttgtacatatgactttgcaacagtaataccgtcatattctttcgttgctaacaacaaaaagtcatgaatccatctactcgtattcgtcatcattaccataagtagcgagctaacttctaataaataatccgctccagcaacagcatcatatgagttctcaattacatttgtaaatccaagtagatgagcaactcgttctcgtttaatcgggaaacttgttgtagagagtgcagccgcccccattggagactgatttaaaagctggtacgtttttttcattcgttctaaatctctttgcatcgtatcataaattgctaacgtataatgaccaaatgttgttggctgtgctggttgtgtatgtgtataagctggcatgatcgtttccttatgatcagcagcaagttgcagtacactttcttgcaataacaaatgatgttctattaatcgtaatacatatcgccttaaactcatgcgatacatcgttacgcccatatcatttctacttctaccaatatgcatattacttacaaaatcgcatttcgcttcttgagaaattaaatgttcgactaaaaaaaagagatcttcatgctgctctgtatagagcaattgctcttctggaattccctctaccttttttaatgcgtgtaatataactttagcttcttcctttttcattaaattttcttccgtcagcatcgtaatatgtgctttatgcacttgaaacatatctttcaataagtaatttcgttgaaaatcaaatacatgttgtaatacacaatccacatatgttttcccagggaaatcagcgccttcactctttataaactcttctttactttgtttcatcaccttttcccctctcacctaagtattactacccatcatacccagagatagaaaaaaagtgcttgtacataaaaataaactcggtgctctctgcaccgagtttatttaataaaagtcgcatcatacttatcactttgcaacacttggaaatgcaagtttgctaaatgtttccgtatttctgcactatcgtcttcatttaaattattcgccaaaaacacaatttctgtacagtttccacgtttatccatagcataaactgcttttgtaaccgtccatggtgtgtaaccattcttttgccccgcatgtctgaatgttttacggtatttcttggcactcatgtctgtttcaacgatatttgcccacactttttcttcagcctctgtcaagccacctttatggtttgccttttgaagtaataccatataatcatttgcagaagctgctggtaatctatctgaccaaattttgtcgtaacgttcctctaaataaagcggaatttccttctgtaataatggtcccttcttctttaagcgttcatgaataatcatcgcatattcacgatattgctcttgagacatttcttttaactttttctctattttatattttggaacatgtaattctttatgcaaatatcccgggatatacaaagatgaaacgattggaaatagtggttgatgtgcaggaagtgataaactttgtaaatttcgattgatgttatctaatcctaacaattccattaagtattcagcatttgcattcgaactaaacttaaccattccttttgccacttcttctaaagaaaccgctccttcagttatcttgcccgtcttctccaaatacttttgccatctatcttgtgcaccaccatctgtattcggcacataataacgattcacatcattaatcgacacgaaactagaagaatcaattttcccttcagtaacttgtttcgtatattcaagcgccacaattaatttcatcgtactagcaactggcaatacaacatttgggtttacagaataaacaactttatcatttctctttactagaagcgcactatttttttcatctttatgttcttcaataaaagatgcaatatactgtgcatcatcattatttgaactccacacttttttcactaaaaagttacccgatattagcaaaacaaaaatacccacaattactgcgcatactatagtttttttcaagtaaaattcctctcctattgtgtaactcttctctatttatcatttaaaaacaaaataatggagatggtcatttaaataaccatctccattattttaacttgtatgctcctattatgtctacgtcataaatttcacaaaatcctcaagaaactttttataatgtaacgaccaaccaattcgcacccaattttttaatgcttttgcatcaggttgaggccgaaaatcagcaatactctctccttttgcaattccaactgtatctacatcgacacgacgatatacataatctaaaagggatggatttgccgcaaccatcattgtaacgacgtcatgtactggacttccttttattttcggatttaactttctataagctttataatagtacgtaaatatcggctcgattaacttattaaaactcgttttagagtgtttcgtaatatattttaccatttccggtgtaataattgcttcagatgtaacgttaagtggcactaatgttacatttttggcattttgcataactaattgtgacgcaatgggatcaccatgaaaattcgcctctgcgactggtgttacattgccaggcattaagaaagcaccgcccattatataatattctttcacatacttcatcatcggcttttctaaaataaatgctgtcgctaatgttgttgatctaccagcatcgactattattaattctcctttatatttttcaagaagatcaaaaaatgtacaaaaaggctttatatttggtgaaaaagtttttggaggtttaattggccctaaaccgtctgtcccatgaatttctggataatacgtcgtaatatctccggataaaggaattttcgcaccattaataacaggtatatcttcccgtcctgccatttgcaataaatatgcggcattacttgtcgccttttcttgtgttacatttccatatcccgttactacaccaacaatatcaatatcaggatgcaacaatccatacataattgctaaagagtcatcaatgcctgggtctcctaaaaataatacttttttcatcgacctcaactccatcccctcagttgttattaatttatgaataaccgtggatatacagaataaaaaatgaacaaattcacacaaaaaaacgcagtcttataaggactacgtttcttcagctaacctatactgttttttttacagcactcatacttccaatgatgtaagcgataaacgcaaaacaaatcgggaagacaactgtatgtataccgaacggatttggatagaaaagatgaatacacatatatgagcctaccccaactaaaatagacgcaagcgctcctgtagcatttcctttcctccaatataaccctaatacgattggccaaatgaatgctgcttctaatccaccgaaagaaaataaatttagccatattaaaaaatctggtggtttaattgccgctgcataaacgagtagtcctacaatacccgtaatccacaaacttcctttttttatcgtactgtctgctgcatctttatttatgtaatttacgtatatatctttaataattgacgagcttacaagtaataataaagagtttactgtagacataatcgctgccatcggtgcagctaagaaaactccagctaaccaaggtggcaacacttccatcgcaagtagcggcattactttatctggtaccgttatacctggaagtactactcttgcaaatacacctgttaaatgcataccgatcataattgtgccaacgacaacggttccaattattaaagcttggtgcatcgcttttgaatttttataagacatggcacgcacgctaatttgcggtaaaccgacaacgccaattccaattaaaatccaaaatgatgtaacatatgatttcgttaaactgccatctgctccgaatggtgtaattaactttggattaatttgaacaagttcctgcataatcttttcaattccaccaccagcaatgacagtagcaattaaaatgattgttgttccaactaacataatgattcctaataatgtatctgatagagcaactgcacgaaatccaccaattaatacgtacacaagtacagaaaaagtaaataaaaatagtgctgttgtatacgatagccccgttagtgactcgattaatcgtccaccaccgacccactgggctactgtcgctgaaaataaaaagataataatacataacgcagaaagtataacaactgctttattattgtatctcccttttaaataatcgataagagtaattgcttccatcttcctagcgataattgcaaactttttaccgataaccgttaaaacgatataccctgttacaacttgaatcgcagataacagtacccatccaagacccatattgtaagcaataccagggccaccaataaagctacttgcactaccgtacgtagcaatcattgtcatcgctaataataaaccgcctagctcacgcccaccaagaaaatattcttgcaaaaatttattatgagcagttgcttgcacgcgtcttgaagcatatacaccaattaaaaatacaacgataaacgaaattatcattggaatgattacataccaattcatctattattcctcacttttttcttcctcatcgagtgaaatatcttgaaatacaaaacgaacaactaaactaagtaaaataaccataacgataaatccaacgatacagctataaaaaaaccatgcgggaaaacctaatacatatgtatattcattcggatttttactaccaagcccataagcaaatccgtaccaaattataaaattaataatagcaagtccaagaccaattaacgcttctctatgggctattcgaaagcgtggatcatcatgataatctttcatttttacccctcctctcacgatgtattattgtaccattgttcttctagtttttcctactagaaagcaaaaacaagcaggatttttttataatcatatagaagattctcttacattacatattttttacaattgtaacacgaatgaaatttgaattttcagtatttcttaattatgattttaattagaggctttccatctagtttccacatccttgatttcggaataagcgccgtctcgtactgcgtttacattatattttcaagggggttatacaatgagtcaactagctgtaaatcttcatgaaaaggtagagaagtttcttcaaggtacaaaaaagttatatgtgaatggatctttcattgaaagcgcttccggtaaaacatttaaaacacctaacccagcaactggtgaaacacttgccgtcgtttctgaagctggtcgcgaagatattcataaagctgtagtcgcagctcgtatggcttttgacgaaggtccttggtctcgtatgagcactgctgagcgaagccgtctcatgtacaagttagctgatttaatggaagaacataaagaagagctcgcacagctcgaaacattagataacggaaagccaatccgtgaaacaatggcagcagacatcccacttgcaattgagcatatgcgctattacgctggctgggctacgaaaatcgttggtcaaacaattcctgtttccggtgattactttaactatacacgccatgaagctgttggtgtcgttggtcaaattattccttggaacttcccgcttcttatggcaatgtggaaaatgggagcagcgcttgctacaggatgtacaatcgttttaaaacctgcagaacaaactccactatctgctctatacttagctgaattaattgaagaagctggattcccgaaaggtgttattaatatcgtacctggattcggtgaatcagctggacaagctctcgttaatcatccactcgttgataaaattgcatttaccggttctactcctgtcggtaaacaaattatgcgacaagcatccgaatcattaaaacgcgttacacttgagttaggcggtaaatcaccaaatatcatcttgccggatgctgatttatctcgcgcgattcctggtgcactttctggtgttatgtttaaccaaggacaagtatgctctgctggatcacgcttatttgttccgaagaaaatgtatgataatgtcatggctgatctcgtcctctattctaaaaaactaaatcaaggtgtcggtcttaaccctgaaacaacaattggtcctctcgtttctgaagaacaacaaaaacgtgtaatgggctacattgaaaaagggattgaagaaggcgctgaagtactttgcggaggaagtaatccattcgatcaaggctacttcgtttctcctacagtattcgctgacgtaaatgatgaaatgacgatcgcaaaagaagaaattttcggtccagttatttctgcaataccatttaacgatattgatgaagtaattgaacgtgcaaataaatcacaattcggcttagcggctggtgtatggacagaaaatgttaaaacagcacactatgttgcaagcaaagtacgtgcaggtacagtgtgggtaaactgttataacgtttttgatgcagcatctccatttggaggatttaaacaatctggtcttggccgtgaaatgggatcttatgcattaaataactatacagaagtaaagagcgtttggcttaacttaaattaatgaaaagaacctgacctatccggtcaggttcttttcattatgtattcctttaaatttgcagtcctccgctcacatttaatacttcacctgtaatataagatgcgtattctgatgctaaaaaggctgctgcgttcgcaatatcttctggcgttccaattctaccaactggaatagcgccaaccatcttttctttcactttatctggtatcgttttggtcatatctgtatccataaaccccggacaaatcgcattacaagtaataccgaaacttccaacttctttcgctgctgttttcgttaatcctacaactccagctttcgttgcagcataatttgcctgtccaatattcccctctctacttatagaagaaatattaataattcttccatatccttgttgtctcatataaagaagcgctggttgcatacaataaaaaactccagttaaattcacttgtaatacttgttcccaagcagatttctccattttatgtaacattgcgtctcttgtaattccagcattattcaccaaaatatgtaatgtaccaaatttttgaaccgcatattcaattaacgactttgcttcattttgattactcacatcacatcgatatgagcacacttcatatccttcatctgataactcacgtgtcgttttttgtagcgtctcttcatttacatcgctaattaatactttcgcccctagctttgcataaacccttgcaatctcttttccaattccctgtgcagctcctgttacaacagctgttttcccatttaaaaactccattcctatcccccatttctattacttatactgtatatttcggctttttactttccaactcctctttgtataaaaaagtctatttgtgtcaaactaactttgcaacgtcgcataaagtgaaactttaattagtgggaagtttgttcatcccccactgattatcagccctcaccaatcgggcatttaatctcccacctagcttctttgttccatctgagttttaaggtgggagttttactacccgttatgcgggataaattgcaaggagattgtgtcgaatgaataaaaaaaatttcaaacaaagcaaaacaactgatggcattgatgttgagttctctcgcgaactcgctgaccacaatgacttagaagcaaacgcacgtgcaaatgccgctgatgcacgtcaaaagcgccaatcaaccgaaaaataaggtacatcacaaccttattcttttcaaaagggacctactacccaacaaaataaaccgagagacatctctcggtttattttctatatttttttgcataatgagccaaagtaagcaacggatatatatgagcataactatgataacgaatataaaacccacctggtaaacctgttccagtaggatatttttcatttatataagggttggagagcaaatatgaaataccttttcgaataactggcgtttctttatcatagtaagaaatgagggcatctaacgcccatgctgtttgggatggtgtactaaatggcaaagtaacaaatcttttttccacactactttggcaagattctccccagccaccatcttcatgctgtatatgttcaagccataaaacggctcgtttcaatgatgaatcgctagatggtattcctagtgaccgtaaaccagtcaacactgcccacgtaccatatatataacaaattccccatttcccataccacgatccattttcttcctgtacattcattaaccaatttatcgcactttgtttttgtttctcgggcaattcattttgcgtatacgtcccaaaaaattctagcactcttcctgtaatatctggtgtagaaggatctgtaatcatatcacttgcattctcgattggtaaatttgctaatatacggctcgttacccctttttcaaaagctccccaaccaccatcattattttgcaatcctttaacccaattaaccgctcgcttccaagcattatctacattttcgttccctctacttcgcgccaacgctcttaacacagcagttgtatcatcaatatctggaatcgtcgtattcacatccgaaaagccccaaccacctgggaagagatccggtgcatgtacactccaatctactttcttcgtttgctgttttcttagtaaatacgctgatgcattttgaatcactttacttactttcggaacttgagcttcttgcaaagcataactgagtaaagctgtatcccatatagttgacggagagttttgcaaatggctccctctctccatcttccatatataagatgtaattcccattatagccttctcaataattggtgattgaatagaatgtcctaatgcaagtaaagcataaatcatataaaacgaggcagttgcgtagctatataatgttccattttcatcaatacgccctttcataaaacgttctacttcctcatatcctttatgatgcaaagaaagtggatacgttataattttcttcacgtcacttactaacgtttgaaaaactggagaccgatcctcccgaaaccattctccgcccccgcctgcaatgtgatttaaatttggcaataactttttccctactcgaaatcttttatttaaacacaacatcatcggaattaaatgaatacgtgctgagctactcagttcaaatatactgagaggggaatcattctgcagaaacataattggtgttggcaaatgaaagagagaaggatattcatattctccatgaatcgctaataaaaacttcgtcataaaatgagcacgcgctaccccaccgcgctcatttataaacatttccgctcgcttcatattcgcatcttcttttgtatatttttccgatgcaagtaaggcagcataagattgaattgtagcagataaattaccacccacctcatcttcatacaatttccatgttccttcatttgtttggagtgatgctaatctttttacaaacggttctatctctttatctctacctaataattttaataaaaaaatcatatgacaatctgttaatggcgctccctcaaaacaaaaccgccacgtaccatcttgccgttgcattgtttgaagtgcagttgttcttctcgctatttcttcatacactttttcatataataacaagttactcacccaccctttcgaaatccgtataacgatattcaaaaaggtagctgaatatgtataaaaacaaagaaaagcagaacatataaaatgttctgctcataaacaataccctactccgacaataattcctaataaagcaccgactactacttcatacggtgtatgcccaacaagttcatttaacttcttatattctgtttctctaccgtgaaaaaagtcattcaatatttttgcttgtttacttactgcaagccttactcctgaagcatcatacataacaataatggcaaaaatagtagcaaccgcaaacatcgagctttccacaccttccactactccaactcctgtagcaagcgctgtaactgttgaagcatgagaacttggcatcccacctgaagcaaaaaactttgcaaaatcaaattcacctgttttaactaatttaaagactactttcgttaattgtgctaaaaaccatgaaattacagctgccataagcggatcattatgtaaaattgtttccatgttctcagctccttactagctataatggaaatcctatatagtatcagtataaagaaaaatgcgtagaaaatactacgcattatgatacttttgctgatttattttttataaatttcggttgtttctgcactaaaaacttagtcttcgctaccgagaatacaaataatgcaacccatatacagaaaaatgcaatcatatgagtagatgtgaaatgttcaccaaatacgaatacacctaaaattaagctaattgttggtgcaatatattgtaaaaaacctaccatataaagcggaataagttgggctccttttgcaaaataaaaaagtggtagagctgtaacaatacccgctcctattaatagtaatgtcgataacattgagatagagccaaatgagccgaaaccatgtactcctgtcattactagataaataatcgcaaacggcgttactaacatcgtttccatcgtaagtccaattgtcgcatcatagtttaacaattttttcgttaatccgtataatccaaatgaaagggcaagtgataaagaaacccacgggatagccccgaaacgtactgttaaaatgataacccccactccagctaaaccaactgcaacatattgccagaagtttaacttttcctttaaaacgactgtaccaagtaaaatactaataagcggattaatataatagccaagactcgcttcaataacatgattatgattaacggcccatatgtaaacaaaccagtttccactaatcaagactgaagctattgttaatgacattaataatttaggtcgtttaaaaagattcacaaattccccaataaactggcgaaacctcttcgtaacacctaatacgagtaacataaaaacaaacgcccaaacgatgcggtgtgctaatatttcatctgctggaacttcctcaacccatttccaataaatcggtaggattccccacatcgtgtaagcaccagccgcatatagtatcccttttttttgctctgctgattgactccccatcttcctttttctcctcttctcattttttctccattatacggtctcacatgctcactttaccaataatcaatctgcatttctttcgacatttctcatacaacgaataataaacataccgttattacaacaagtaacggtatgccgaaaacaaatttctttttatgagttttatgatgaaacatatacatgccaatccaagttccaactgctcccccaactgccgctgataaaaacaacgtactttctggcgttctccactgtttcttcttcgcttttcgtttatcaagccccataaggctaaaagctataatgttaataataagaaaataaatccatttcatcgctttctctccttatgaaaaattcgcttaatggtaacacgaaaaaacgacggaaacaactgaagaactctttttatccaactagtttcattcctttttcttaattagttaccttcatatttacataaccaactaaaatcgcagttaaagcatttaatatagaaaaatgttatgagcagaatcctatatttcattacattcatccactaccatatcatcaaaaaaattgctctcaatcactttctcatcaaaacgaagaactacaattagccctacatataaagaaacaaaatttagaaaccattccccattctcatctttcttagctaagcatttaaatatctcttgaaattgcatacgctcatctgtcgcaacaaccggtcgcacgccaaaatatttcaatacaagatgtaggttgagctgcacggataatgataaaatatactttaataactcggtataatgagcaacatttttttgactatataacttcacaagctcttgatgtaaagtagaaattgataattcttctttagtcacttttgttgcttctatcatttcaatcatctttttcatatccattccatttacccctcctgttacaaaacaaaagccaaagtatacttattttataatcaacaataattgattatttctcgtctctctttcttcttcacttactaagtcatacttttttaaaagatgaaatacatcatttaatatttcttgtgagtgattaccttgtaaaaaattttttaaccctttaaaaatctcttctgataaaaaactcttttgactttcaagcttattcatcacatcttcaatagaatgatcaatgttacatgccatactaaacttccccctctatcctctataaataatatcctcagctaacgatgtaaacacttctccaacaagagaatcttcatcatatacagatgaaccattattttcttcacgtttcgcaaaaggtatttgagcaattacttctgtttgcaattgttctgcaagcatttcgccgccgccttttccgaagagataatttttcgatccatcttgttcttcataataagccatattttccacaatacctaaaatctcatgcttcgtatgttttgccattacaccgactcttgaagcaacgaatgaagctacattgtgcggagttgtaacaattatttctttcgcttgcggaatcatcgctgcaacatcgatcgcaacatctcctgtacctggtggtaaatcaagtaataaataatctaattctccccagtgcgtattcgcaagaaaattttgaatccatttatttagcatcggtccgcgccacataactgggttatttccttctgtaaaaaatcccatcgacatgattttaacaccgtgactaatgactggaattgccgtttgatcaatcatcgttggtttcttattcgtttccatcatagctggaatactaaaaccatatatatctgcatctagtatccccacttttttgcccatacgcgctagtgcagttgcaagattaattgtcaccgttgattttccaactccgccttttccactcgttacagtaataaaacgtactcctgaatccgggcgaagcatgctcggcataccagtttctgttctagtatttttctttaatttctctgttaaagctgtacgttcttcttgtgtcatagaaccaaatgttacctccactttagaggcaccaattgcgtgaagtgattcttcaatatcttgctgaatttttgcttttaacggacaaccttggattgttagtactacttcaagtttaacctttgttccgttcatttgtatatttctaaccatatttaattctacaacacttttgtgtaactctggatcctctacatgttttaatgcattcattatttgttcttgagtaagcatagaactcatcccttctcttattctaatttatatacaacattttcttggcgcttcatctggtgaaaaaacttatcatccaccgctaacaggcgggattaatgcgactatatctccagcttttatcatctcttcattcattacaaactcttcgttaacagcgaccatcactttatccaacgattgtaaacaatagctggctttaagccattcttttaattgttgcactgtcatttcttgcttttctgaaatcactaatcgatccgatccaacttcctcacgcaaatttgcaaacaataaaattataatcattttctcattcttccttctttggttttccttctggatatggtgtattttcaagttgatctccaatccacatcgttccatcttcccaaaattcttttttccaaattggaacaattcgttttatacgttcaatcgcgtactcattcgcttcataagctactttacgatgcggtgatgaaactgcaatgactaccgcaatatccattatttctagccgccctacacggtgcgtaattgctacttttgtatccggccatctttcacaaatttcttctccaattctcataagttgttttactgccatcggtttatatgcttcatactctaaatgtagcgttcgttttccttttgttaattctctcaccgtaccaataaatgttgtaatcgcacctgcttctcttcttgcgactttattcgttacttcttcaactaaaatcggattatctacaatctcaaatagcacttgttccattaaaaccacctctcactttatgaaatgtccaaggccattcactaccttcgttatcttctaataaaagaacatcgacaaacatatcttttttatatcctcttgtcccgcccggcaatacgataaacgcgttggattttgccaatgaagaaactgagctagatttatcaaaccctgatggataagcgattaatttcccctcatcatattgcaattttgctcgtacaaatcttgtaaatggattcggttttagaaaatcttctcctaataacgctttttctctttttaaatgtactttttcactaaacatatacgtccgaatacacggtcttacgaataattcaaaccctacgtaacaagctgatggatttcctgataaaccaaataataacttgccatttaattgtgctacagtcgtaacacttcctggtcgcattgcaactttattaaaaagaacagatgcacctaacttttcgtaaatagctggtaaataatcataatctcctactgatacaccgcccgttgtaattaacatatctacttggccaagcgcttctttcacagctgtaaaacacgtattaaaatcatcactaaacttcccaaaatattttactcttccgcccgctcttcgaatttgagacaatatcatgtacgtattactgtttcggattttccctggctgtaatgaatcattgacatccagtaattcactcccagtcgctaacagtccaattacaggctttctcgcaactggtacttcactataaccgaatgtagcaagaagagctgaaatacctggattaatgtacgatcctttctttgcaagaaccgttcctttacgagcatcttcaccttgaaaagaaatattgtcgccctttttgaatgatcgcttcacttccatataattgttgccattcttctcatattgacgagtcagctctaacataacaaccgcatcacacccattcggaatttgtgctcccgtcataattcgaactgcttgaaacggagctactttctcatggaatagcgatcctgcaccaatttcacccactacttcaaatacaattggcgtttcataacttgctaaattagtatcttctgctcgaatagcaaatccgtcatatggcgaacgattaaatgacggtacatcatggtcagctactaaatcctctgctaatatacgtccataagctaattcaattggtaatagctcctttaagcctttatcagcaaatcccatcactttacgaacagcttcttcaaccgtaattggcactcttctttccattgttgacaccctctctattaaccgaatacgcgataatatagttgtttcgctttcgaaatatcatttgtaccatgaataaaaacacgaccatctcgaaaaacaaccacgcggtaatcatcgaattggcaagatagtaaatacggattccgatctactttccccagtttttgtaatactttttctatatcatcaaaattgtatttcctattgtctactgttctaatttgaactgtatttcttccgcataaaacagctgctttcgtttgattttcgtataataaataaggataagttcgatttgaaccgcatgagagacaagcgtctgtttttattttccctaattttataaaatgattttgattactccatatatcaaacatgaaaaatgtttttctaattgctgagaaatcttccactaaaattttgagtgcttctgccacttgatatgctgcgacgatttgaacagtagggctaataattccagcggtatcacatgtcacacctgtaacaggaatatttttaagcatacaatgtaaacacggtgtctcttgtggaataattgtataactcataccatacgatccaacgcaagaaccatatacccacggaatattatgtttttgtgataaatcatttattacaaatcgaatatcaaaattatctgttgcatcaatgattacatctacattttttaatagaccttccatattttctgaagttgcatccattacgaaagcatgtatttgtacttccgaattaatttgttctagccgattttttgcagcaattgctttcggcattttctctctcgcattttgttcagagtacaattgttgcctttgtaaattactccattcaacgtagtcacgatcaataatcgtcaacttgccaacacctgcacgtacgaaactttcggcacttgcacttcctaatgcgcctgcccctacaattaacacatgtttatttcgaattttttcttgtcctttactcccaattggtttgaacaactgttgtcgtgaataccgatcagccattacatacccttcctctcaagaactctatttcatattagaatgttgtttctgataacaagcaaagtaagcaaaaccaacaaacccagctcctccaattacatttccgataaaaacaggaacaaaatttttagccaaatccatccacgttagatgaccagcaaaaataacagcggaaatgacaaacatatttgctactacttgctgaaatccaatcactacaaatgccataattggaatccaaattccgatgatttttccgacaaaatcactcgtcccgtaagcgagccaaagagcaagacaaacgagccaattacaaccaattgctaaaattaaagttctcccaaatgattcatgtaacttcccttccgctatcgctaccgttttatttaaatactctccctctgttaatccgccaagatgcccaaagcaatacgcaacgaaaattgccccaataaaattcatgagagtaatccaaacccagttattcagtacgcttatcaatgtaattttctttgcataaagcgccatagacagtgacatcatatttcccgtaattaattctcctcctgctaatactacgagcatgagtccaacaggaaatactgctcctcctaaaacattcactagacttccccagcgctcaggtaaattccctaaaactcgaatgttaagtaaaaaacctatcgcaataaacgctcctcctaaaaaaccgagaataagcatcgctggcaatgtctgtcttactttttgaacaccggcctcaatgacaagctcagcaatttgttccggcttatgaaatgccattacccattcctccattttctccaaataaaaaagcagcttcaaaaaacctcctcaaaataaaggtttttgaatgctgcttaatttctctgcacatcttttacagagatatcaatcatcacttttactataaaatagaaaatccacaactcttgtaaattttccatttttcactatgaagctagctttatatattaaccaccgatatgtgacatttcaattttaggtattgttttcttatttgtatgatttaagcgttcatctgaataacgatcttccctattattccatatatcgcgtactacatctgtaatgtcctcatctgtatgttcagaacgaagcaattctcttaaatcatttcctttagaagcaaataagcaagtatataattttccttctgcagaaatacgagctctcgtacatgatgagcaaaaagaatctgttactgatgaaataatacctatttcctcatcgcttcctatataacgatacctagtagccacttcaccagaataatttgcttctatccgttctaacggcataacttgatgaatcgtatctactatttcttgtttagagacgacctcttttaaatcccaaccattataatttccaacatccatatactcaataaaacgaagaatatgcttattttccttaaaatattgcgccatctgcaaaatgtcctgttcgttttttcccttttgaacgaccatgtttattttaattttcattccaacttcagctgcagcctgtattccttccagaaccctttgcactttgctcctattaccatttaaatagaaaaaccgctcttcttctaaggaatctaagctaactgttacacgtgatagtcccgccttatataaatcaggagcaaactttttaagtaacgatccattggttgttaaaccgatatcttctacaccatcaattttattaaggcgctcaataagctttggaagccctcttcgaagtaacggttctccgcccgtaatccgtaattttctcacacctaaagaaacgaaaatacgtgttatcctttcaatttcatcaaaagataaaattttatcattagacaaaaacgagtaatcaggaccaaatatttcttctggcatacaatatcgacagcgaaaattacagcgatcagtaactgaaatgcgtaaatcctttaacggacgttgcaacttgtctaatgtaactgatttcatcttcattgcctcacttttattttatatttaaaacacgttctggatgggtatatacatttaaggagtgattacgaataaatcctattgtcgtaatacctaaatcttccgctagttgcaaagctaactcagttggagctgattttgatagtataatttcacaaccgatttttgcaactttcaataatatttccgaagaaatacgaccactaaaaacaatgattttatcttttatagaaatatcgtttcttaaacaataaccgtaaattttgtctaatgcattatgcctaccaatatccattcgacttaaaataataccattcacatcacataaagctgcattatgaaccccaccagtatgatgaaacgtatccgcagattgctgcatttctttcattaaccgaaaacaatcctctgcagcaacctgtacatggacacccttcattttttttgcacttagtgcatcatttgcaaaaacaaacccttgcctactcataccacaacaagacgtaatatagcgtttattttgcatttgttcataatacggatttacttttgtcgttgttacatgcacaaatccttctttctcctgcacccatacactatcaatatcttcatacttccgaatgattccttcagacgctaagaagcctattaccatatcttctatatattctggagtactaaccattgtaacaaactcctgtccgttcattttaatggtgacaggaaactctgttacaatgctgtcctctatatgtttaaatgctccttgttcataacgaaagatttctctttctacctgtatcggtttcacgatcagtatccttctctcacgttatatttttatcaaaaacaaatacagaaactgcaatatcttcttctactttcatatctgaaaacaaattcactaatttcgctccaacaagttcctccaaatgttcacgtgaattcacagcatacacctcttgaatcattttcgttctagccatatgaaccatttccgcaccgtccatcgtacttgaaataaatttttcagtaggtgttaagtttccataaagagtcgctatagccatattttctgcaaaaacagtatgaattcgttctggtccttttccgaaaagttcttttcgaagttttcgtatcatatcattaaattcatgtactttttttgacatacaatcatacctcccaaaagcctcattttactttattatatattttaccaaaatgagccttccgcccaaactatttcgtacaaatatttaggcggaaaggttcacttcatgaagtttattcgtcttttaaccctttccccataccttttaagaaatgaagcccaaacccgatagcacggttaatatctgggtctttcaatactttcataagatcgaatacccctacttttttattactttctagatgttcattaccttcttctagcccgactaataaactacctataagctttttcgtaagttctgggtcaagttcagttaacgcccctgcagcacccatcatattattaattaaatttgtaacaggctcacgagttacttgacctagaacgatctttgcaattggttctttcgctttcagcatagaatttgcagcttctagcattccaatgtcatttaattcccctactatattaaacatctgatttagagcttcttcattattagttaaaagctcctttaaatcatctaatttttgctgttttatttcttcctcagttaattcttgtttttgaatcatttttataggtgcagccatagttttctcctcctacttatccgttaaatgcacataccctggacgtgcccacttacgatgtacctcaatgccagcttgagggtgacgttttttattgcgtgggttcgcttttggcatcggattttcgccatcaacttctaacacttccatacgcactttcgtttgtttatacgcaggtgtattcgtacgtacatccacagcaggacctgttaagaaattaattgccgtttcgttatctgtagagttcatcggtaaatataactcattcgcttttacacgatctgtaacgagtgcacgtaattttaatgctccaaaaggagagacaagacgaactaacgaacctgtttttacgccacgttcttttgcaaggtctggagagatttcaacgaaaacaccaggtactttcgtttgaatacctgttgatttatttgtcatattcccttcatggaaatgctcaagcatacgaccgttgttaatgtgaaggtcgaactcagctggaaattcagctggacgtacccagtcagcaatcgcaaaacgagcttttttatctgggaagttaaatccatcttggaacagaagtggtgtatttgttccatcaaaacttccccaatggaaactgttccatccttcaagcacttcatagttcgcttgcgagaacaatggtgataaacttgccatttcagcaaagatttcacttgggtggctataattccagtttgcacctagtttattcgcaacttcctggacgatccaccagtctggtttcgcgtctcctagcgtaggaagaacttgatataatctttggacacggcgctctgtatttgtgaaagtaccttctttctcaagagatggcgctgctggtaatacaacatctgcatattgagcagttttagaaaggaaaacatcttgcacaacgaagaaatcaaggctagataacacttcatgtacatgatttgcattagaatctacaagagccatatcttctccgacaagatacattgctttcatttttccttcgtcaattgcgtgaagcatttcaatattattaagacctggttcactatcaattttcactccgtaagcagtttcaaatttcgcacgttccatttcgttagtaacgtgctgatatcctggaagccatcctggtaaagtacccatatcacaagcaccttgtacgttattgtgacctcgaagtgggtatgcacctgctcctggacgacgatagttccctgttgcaagaagtaagtttgaaattgcagcggaagtatcagaaccacctgtattttgcgttacccccataccccaaaggatacatgtaccatctgcatcacgaatcatttcagccatttgaataagtgtttcttttgaaatacctgttacttcttctgcatattcaagtgtatattcttctaggctctctttgaaatcttcaaagaagtttacattctcattaataaattcctgatcatgccaaccttgatcgatcatatatttcgtaacagccattaaccatacttgatctgttccttgttttggactaataaagacatctgatcgctctgccatttcggttttacgaagatcagctacaattaacttttgtccgtgtaatttatgtgcacgtttaatacgtgtagctagaacaggatgaccttctgtcggattacatcccacaataataacaagaccagattgcgcaatatctttaatcgttccggcatcaccgccgataccaattgtacggaacaaaccatccgttgctggtgattggcaataacgtgagcagttatcaatattattcgttccaaatacttgtcgagctaatttttgaattacataattgtcttcatttgtaattttagaggaagaaataaatccaatagaacctttaccgtactcttctttaatagcgcctaatttatttgcaactacattcagtgcttcttcccatgtagattcaacaaacgttccatttttacgaattaaaggttttgttattcgttctttagaatttacgaaatcccaaccaaatttcccttttacacaagtggaaattgcattaactggtgcatctgaagatggctgtactttaaggattttacgccccttcgtccacacttcaaacgaacaacctacaccacaaaatgtacatactgttttcgttttcttcgtacgagtatcacgcatggccgcttccacttctgataccgcaaaaataccgctatacccaggctcaacttctttaattaaatctaccatcggttcaagaatatctggttttaatcccgtcataaatccagcttcaccgagcatcgttttctccattaaagcgttacaaggacaaatcgttacacattgaccacagctaacgcatgaagaatcattaatatttactcctttatcccaaataactcgtgggcgttccgcttcccagtctatcgataacgtttcatttacttgtaagttttgacacacctcaacgcattgaccgcatgcaatacattgattaggatcatagcgataaaacggatgcgtcatatcaacttcacttacatctactttcggttcatacggatatttttgatgttcgatttccattaattctgctgtattatgcagtttacagttcccattgttgttgtcacatactgtacagtataataaatgattttctagtaaccgatccatcgcctctgtttgtgcttcttttgcgcgaacagaagcacgttcaatgttcataccttccgttgctatcgtcgaacaagaacgcattaactttccgtcaacttctacaatacaagtgtcacatgtttgaataggatctacttctggcacgtaacaaatttgcggatgttcaatcccgttctcattaataacacccaatatcgtcgaaccaggctccgctgtatacttttttccgtcaattgtaatatgaaccatgttgtcattcatggtctttccccctttttgagaataaaaaaactccaccacgaaaatatacgcaccacatttttggcacgctatcatcatggtggagtagtttattagcacatcttgctaaaataccaatccatttattcataaataaaacgatagattcataacaggtcatatcacgattccatctttaacactataattatagcgttaaagttaaaaatatacaatataaaatttaaactacgcatatgtcagcttgtaactatccataataatccatataaaacataacaaggagtaagcgaacaaatggggtcttttaataaatggattcgtggtgaaaaatctttttctacccaagagcaagctaatcacacattaaataaatctatctcttcttccctttcccttaatttaaagcacttgtccaaactgtttagcggtattccagaattaataacacgcacttttccattaaaaaacggacaggaagctgcacttatatatatggaaggacttgtagacaaaactgttattaacgtaaacattcttcgtcctctcttatttaaagagtggaatgaagacgatttttgggaagcctctgtttctatcggaaatattaaaaaagttcaacagtggacagacattgaacaatctcttttacacggcaaaagtattttatttataaacgggcaactatccgctttagagcttgatacgcaagcggcaccaaaaaggagcattgaagaacctacaacagagagctccataaaaagctcacacgaaggatttaatgaagtagcgagcgacagccttgcacttattcgtcgatatattccaaatcgcgaattgaaagtgaaggaattcactgttggtgaacgagctacttcaaaggtttttttgctttatctagcagatgttgcgaacgaaaatgtcgtaaaagaaatggcatcccgtatcgagtcagtaaaagttgatgcgattcttactactggtgaattagagggatttgttgaagataattcctttactctctttccgcaattatcaataactgaacgtcctgacacaacaacacatcatattctagatgggcgaattgccgttattgtagatcgctcaccaggcgtattaataggacctatgaccttttcatccttttttcagacgatagatgattacagcttcagacctatgattccatcttttatacgactccttcgtttcactggactatttattgcaatatttgctcctgctctttatattgctatgatttcctttcattatgaagtaattccacttaaattattgttaacaattggagaatctcgagccaaaattccttttccgcctatattagaagcacttttgatggaattagtacttgaaatgctacgcgaagctgcagttcgacttcccggtcccgtcggacaaacaattggcgtcgtaggagggattgttattggacaagctgcagttcaagcaggaatcgtaagtaatgttatggttatcgtcgtatctattaccgcagtcgcttcttttatcattcccaatctggaaatgtcagcaggagttcggattcttcgctttccaatgatgataatcgcttctttattcggagtcattggaattatggttggaatgtcagttatcatcatccatattctttctatggactcacttggtgttccttacggtagtcctttttctccatcatttgctacggatttaaaagacgttcttgtgcgtttgccatggaaactaatgaagaaacgaccactatcccttaacttaaaacaagaaaatcgacaaccggatatagaagaaaaggaggaagataagtgacaaagcgtgtaaagagggagattagtttatttcaatacattttaacgattagtggtgttcaagtaggattcggtgtacttacactgccacgtgaagtggcccaaggggcgaatacagatggctggatgtctattattatagggtcagtctatgtattgtaaaaatcatggagaagcatcctggttaccatttacttgatgtgctaactcgttatcttggaaaatggttaggaagagtaggaatgattttttggattttatatgctgttcttgcagcggtttctttaattttttccctcttatacgttattcacatttggattttgcctagatctccaatgtttttaatcatgatgctattatctattccaatggtaatgctcgcatataaaggtgttcttattattagccgctatgctgtttttactgtcttatttacactctggatgccattactattatttatcccacttaaagatgggcattggatctatcttcttcctctccttaaagagggatggataccagttttcaacacagtaaaatcaactattattgcctttctcggatttgagtttgcattcgtcctttatccttacctcagtaataaatcatctgcaaaaaaagggattgttcttgcgaatttgattactttattcgtttacctgcaagtgacgttcgtttctttcctttattttagcccagatggtataactaagtttttatggcctaccctttctctcgttacaccatttcacttctcatttcttgagcgatttgaaattatctttttgtcattttatctctttattatttttgattcttgcattccttatatttttactgcttcagatggaatcaatcaattacttaacaaaaaaaggagttcattacctatttatggtttattattcgggtgtatcttcatcttattcttttatatcccttcctcttaccaaataagtgcgttgcgagaattttggggaactgcaagttattttatcgtttttctattcccggtcgtatttctcttatacatgacactttatcagcattggaaaaggagcagagtttaaatgaggcgctttattcatttcactatactttactttctcataacctttttaacaggctgtggagatcgactcgacttagaaaaacaatcgatttcattaatttacggctttgatgcaaaagcaaaaggaaaattaattgtgtaccacgtaaatcctatttttaatgaagacgtagaaaaaaagtacgaaacacatgaagcgaaagtacgtacacctcgagaagcaaaagcaacgtttaatagttcaagtggcggtttagtatctacagaaaagttacagctcattttatttagcacaaattttttaaaacaagaaggggctatgccttaccttgatgtttggtatcgtgatcctaaaaacactggaaacatgcgcatggttgcagtagacggtccaatttcttcagttatatataataactttaaagataagcctgcccttcccgagtatttaacagatttaattaatacgaacaaactgtacaatcggaccgtttttacgacattccatgaatttcacaggcaaacgtttaataaaggtataacacctgctatttcagaaataaaaaaaggtaaaaaggatgttatcgttactggttccgcgctattaacttctcgcggaatttataaaatgtcattaaatcgttatgaaagcgcccttcttcttttgttacaaaagaaagcgaatacaccggtttcgcttacattgaaaatcccttctacttcagttgaaagtaatagtgatttaaaagataccgatggcggcgatttcgtaacaataaatgttcttagcatggatcgtgatatccatacagattatagcgataaccacttcaaatttcatgttaaaatggatttgaaaattgctgtctctgaacttacattcaatatggatatagacaaagatagaaagaaattaacttctcttattacaaaacaactaaacaaagatttgaacgatttaatccacaacattcaaaaacagcaacttgatccattcggatttggtgattatgcgagagcgtttcaatataaagaatggaaacaagtcgaagttgattggccgagtgccttttcaaaagctaatgtgaaagtggcaccaactattaaaattttagaaaatgggattattaaatagaaaaaacacgctacttgttcttatatgaataagtagcgtgttttcatttccattacaagtattatttcaatggactatactttatttctatttctaacattactatgttttttagcatatacaaaatatatgaaaacccctattataatccatgccacaaaactaattaaagtaagcttagaaaggttcaatgccaaatatatacaacttactattgaaacgataggtaaaaaaggtactagaggggcacggaatggcctcttcatattaggatgtgtctttcttaatacaatgacagctatagatacaaacacaaatgctgttatcgttcccatattcactaaattagctaataaattcaaatccactaatcccgctaataaagctgctagtatacctgtaacccacgtattaaaaaatggagtttgtaaacgtttatggacacttgaaagtctttttggtaacagtccatctcgactcatcgagtaagatacacgaacaaatgcaaacatagctactaacagaactgttgttagccctgctatcgctcccaccgataacaacccagcaattctatcttctcctacagtgcgcaacgcatatgcaaccggatcagcaacatttaattccgtaaacggaaccattccagttagcacgaatgaaacacctacatatagaacggtacaaatgaacaaggaaacaagtagcccaattggcacgttacgttgtggacgcttcacttcctctgcggctgttgcaactgcatcaaatcctaaaaaagcaaaaaatacagtagcagcgccccctaccacaccgtgaaaaccaaacggtagaaatggttgccaattctctggtcttacatattgtgtccctacaacaataaatcctacaataacagccagtttaataataaccattatattattaattcgtgcactttcttttgcaccacggcttaataaaaatgtaacaactaaaataataagaactgctggtaaatcaatgattccacccttccccattcctggtgccgaagcaaaaaccgtaggaatgtgaatattaaaacctagtagcaatgactgaaaatatgctgaccagcctgctgcaaccgcagaagtcgctaataaatactccagcataacacaccagccaactataaatgcaaaaatctcacctagtgtcatatatgtatatgaatatacacttcccgaaactggaactgtagatgcaaattcagcataacagaaagctacacatgcacatataattgccgctaatacaaaagataatacaatcgccggaccagcatgtttcgctgctacaataccagttaatacgaaaatacctgtaccaataattgctccaatacctaaaagagttaaatcaatcgctcctaaagtttgattcaatacttttttcttttcttcatccattgctttctttatgaaaagactcattctttgaaacctctttttcaagtttatctcttacttgttacattctttattactgttctattttaaaaataaaaatatacatagttcacttcccctatagacttagtaacccgtctcaataaaaacagaaaaatcaatctctttataccgtattgaattttcaaaatattaaccataccaaaaaaccattaagaatgctgattgaatttatcatacaattaattatattgtcaataataaatcactcaaaaataatcggctgattatgtatcaaatgttatttttatacataattattttctcaaaaacattgttgttttccaccttaatattcatatgcattttattacattgattttcatacaattttcattacatacaatgtaatgaaaatcataataacctcaaatgaattattattcaaaaataataattcatttgaggttatgtcaccattttaatactaacaaaaaagtgcagattttcatctgcacttttttttattcttccacttcagcttctgcactactattttcaagatgctccttctgagcttcctcttgcaactctgctgaaatcatcccataataaagttccggatataacccaaatatttgatatacacttcctaaaaacggcatcagaatccctcttttctaaagttgtattgccacttttaaggattcccttttcattcattatacattcgtttttggcgtttcttcttcatcttgaacacttaataaattttgccattttttatacggagcgctatttggatctacatatccttttgcatgcgagcgatcccacaattgtttaataaacatttctttctctttctttgccaccatatcggcacctgtaccgtaatagttctggaaatacaactcgatttcatcgaggaatagtcttaataattcatctgatgtttcttctaatgtcggatcatacttcgcttcacggtcatacattaaaatcatatctaaaagattgtggacatgttcttttctaagccatcttacatcttgggctcctaatacgaacggatgtgtatataaatgtccaccttgtatcatcgccttttcttgctcttcttcaaatcgtgacaagatgttttcataaataaacggattatgaagcaatgctctgtgtaatttataactttcgcttgaaatatttttccccatcgactgaattaaaaagctacgtcctacaccgttatattgatacacaaattgtccatcaacagcaactaaactaatccagcgatacatatatgcgtatagtaatgcacgattacatttatcataatctaattttgtttgagtcgcgtttaaatctggcataaaggctggtaagtgccaatacttatctaaatgcggcgttaaactagattttttactatttaatttatttacacggcgataatacgattggaaatagtcacctttatcattcataaatccgtttgaaatatgtcctgatgataatttaggaaaatcttgcagcgataagccgtaatgcgctcgataacagattacttcaaatggcgaaaaggcttcatgtactgtatctttttctttaaacatttcttgaattaattcctcttgcagctctttctttaaagaaggatgtataccccaatattgtaattccctatgatgagcaactttcggaacgaatggactcgctaaatggaacaggtcttcaattttttcacgaacgtattcatcgcgatcacgtttcttataatctgcttcttttcgcaacgcttcaatgatattcagttctaatttatcacgatagcgtacttgcagttcgtcataacaatagctcagtatatgttctcggtagaaatcctctacctttttcgactgaatctcttctgttttcgcatcacgacaatattccccgtacaaactcatataaatttccgctgatatatctttcggtagtacacctaaatttaaatgttgctgcatatcttgccatatcttttcttgcagctgttcttcagctaatacatatacattcgtcgggtttgttttcccttcaaattccttactgcgcttttggatttcaaacagtaaattttcacgtgtttcatgtaaattatcaaaaaatctttcccaatattgaatcattttattaactgcttgatatagcgattgatatacaagttctaatagcatttcttttcgatattcatttaatttgtgtacatattgcgttataatgtcttcaaattctcttttgaataaacgttgctgattattaatcatttttccaaaccagccttgttgttgagcaatttctactcggcgtacagccgttaccgttccatcgatattacccacattaaattttttatcgtagttttgaattacatttcgcttttgttcattattttcatgtagtcgattcattttttccactaactgctttcgaatttcatataacataaaacgtgctgctactgggtgaactggatctgttttctttaaaaaccatgtatttaattgataggactgcccttcagaaccacttggtgaaaagcggtctgattcaatcatgtcatataaaagtgtcgttacatgttcatgtacacggctcggaatcgcatacgcatataaacgaaccgcatgatccactcttgccacttcacctttcatttgttccatcattttcagtttcgcagctgaaattttacactcatgttgcagacgatttaattcctcatctttttgcaccgttcgttgtacataactttctacagcttctaaaaacagttttgatttcgcaactccgagcttaccaccctctgctccttcacgtgtttcattgtacatttgtctatagaaaatatgagcttgctctggacgggtagcaagatgttccaagtcctctaaataacttttacctctctccggcttttcacgctgcatcccacgttttacatcttggtcatatctttgcttcttctcttgaaacagttgatctaaatgaagccacgattcatctaaaccttgcacagcccattttaaagcacaatattttaacacatgctcatacggataaatgagttttgccgttcctgccccgcaatatcgtccttttccgcttgattctgctaattgctgaatttgattgtcttcttgtgcaaaatgacttgtggacatcgggctaaataactgtaaataaattgtatttgccatctgttccatataatctgataaattgtgtaaatggtgtccatgtaggttttcataatcgtataagaaacaataattgtacggtaaatgatgttgtttaattgtatgattcgttcttccgtcttcatctacttgatcagggcgatactctaattcaattgttacaccgccgcgttttgataattctccagtagaaccgagcgtaatagcatgtaattcttttaacgatgcatagccatttgcttgcaccgtttcaaattctttcgcgctaactgttctcgtctttactaaaacatccggcattaaaaacgcaccgcgtattaaaatgttatgatgctgcaatttcttccgaagcatttcacgtaaatataatgcaatttgcagaaacatccctgaacctgttccgcctgctagtgatgttactataatgacacgcacaccatattccgtttgatcacttgtaaccggaaaaattttctcgatttcttgccaaaaagacgtcaatttatcttctttcatcgcagcacgtaacgctaaacgtgaaataacgcgtaactgtcctgctccttctgttaatggcttatcaagtatagtcggatccatcggaaaccactctgggatcgttggatctcctgcaatatactccctaggcgttttactagaacttgtttgtgtcttaaactttcgaatatgatcaaatttacttaatgtattcacatctgtatcaaatacgtgcattgctaccttttttcggcgctcttcaggcagtttttcatatatttgatgcgtcacagtactaccgattccacctaaaccaattaatattgttggaacttgtaatgtcatgtgaaccaccttcctattcttgcttgtttgaaaaaagggaaagagaatgaatactccatccccttcttatccctacctactattcacattcgtacttgtaaatctccttaccatatcctctatcaattagtaaaagttcatttggatatagtgtcttatgttccattcctacttcatcctctgttataaacattccatcaataatcattccaactacttgtgattctttcgctacaaagacagatttcgaacctttcttcgctataaatgtaacggattgcacagtttttctttctgctctaaatgggatcccaaaataatggttccaccatttatttcgaagtaattctggttcagattgatatagccaatctttcgctacctcttgatcccattcataatacagtagtgctttccggtgaaatcttggccgaacaatccatcctaaaacaatgattcctactactaacagtaataaagtgataggaatgacaaacttaaaaataagcgcatatttttcataaaacggagcatcttgaatatggaatgttatgtttttctttacttcttgtaactttgaatcctgcattacgatggtagcttctacggtgccggtatctgtaaaattaaatgtgtcggagtaatagggacgaggataaacatagatttgatttccatgttgctttatttcatagttgattgattgtttagatgtgacaccagtagattttaatagtttctttacagcctcttctgtcatcggcttaccatctaactgtggttgtataataaacggtttactattctctaaatttgtcactttttcttcataatcttttgtaacagtttgaagtgataatttcggtttctcagctgtttcaattttaaattctttcgtctgtctataaaacccctttatattcatatgaactttcccgcgtactaaccctttaccaagcttcgtttcgtaataaaacacatgccttttatcgttccacttcattgcatattgttttccgtctatttctacttctgcctgaaagtaagaagactgaactggcaactccgtaggccttgcttcaataacagctgtcacaccttcatacatttcctcaacattttttctatccttatcctctttatcataagtagaaacagtataattaagtgccggttcgactagtacttgtaacccttctttctcaatatctcggtccacttctatcgtataagttcctggtttaataacttcctcattttccgtacttatatgaactatatttccgaacaactttgcttctcctggtgcatgtatggaaaaagaagattgtaattgtaatggtttagaaatttgtgtgacctgataatcgggcagagaaggcgattgtcgtacaagcgtcatacgctttaacggaaacggtgttgtaatctctactcttttccccactactttcgtttttacaatcgattcaacagaggagaatggatcacgatttgcaactaatgctgccacttgatttacactttttacaatgccatcttctccgcttgacggcatcgtaacaccatttatctctttcttccatatttccttgaacgtatttagttgttctttttcttgttgtcctaaatcttcttccatcgtaattaagactggatgtaacgatatcttttttgcatccatttctttcttaaactgggctaatttctgcaaaatttgttcttttccgccaaccttatctttctctaaatcattaaatgccccgtcagttaatacaataagccaaaattcacgttttccatctatatctgcttccttttttatagattgcatcgccgtttctaccgcgctaaatggagtatttaaatacgttttccatgctccaattccctcaatttctgtttgccttttatccttcgttaacgaaatgtttaatggctcattcggcttactcattggaacgtaagaaaatttatctttttcatccaatagcgcaactaaactttgcaaagcataattggcatatttccagcgatcgttatttctcatgctgcccgaatcgtcatatacaagtgaaacgaccctttcctttgcctcctctccttttgcaaaagctgataaaggtaaacatataaatagaaacaacatgaacgtggcacaaattcggattttcatgatgaggcttcgccacctttgtagacaaattcctatgtttaaatttatgagaggaaacaagatatatgacttgtattttaggacaacgaacccagcataattttattatgtaaacagttataagaactgaatattattccttctagcgttttctatccgatactataagtaaaaaagcctgtttaagctccacacttaaaacagacttttcctactttttattttaaaaacacataacaaaaagtttgatttttgacttaacacatcacttctattgtaaatccaccaggtgcttcaacgtaaaacgtatacgcatggacatgcttaggaggctcgaccaaaaatccatcttccttcaatctttcatttatcttatctacttgttcttcactttcttgtggaaatcctacgtgaaatgttcttggatactgaacttcttttcctttcattaaagttagtataaatccatcattatcacgcataactgcaaaggcattccctcttgttccactacaagttagaccaaaatacttctctaaaaactctctagctgctgttacatctgtaactgttaaattaagatgtttaattcccaatccttcaccttctttctcaattttctaacattttatcatacaaataaaaaacacgccttccacagcgtgtttcattgctttacatacacttcaacaatcggattctctttattatccgcatgcaagcgtatattctcttcacttgtattataaatactagctaataacattatcgttaacacattaggtgtcttcgcatcacttccgtattttctctcaagcgcttccttatattcaaaatctaaatccccctgcacatatgtatacacttcaaaaccatcttctaaattgcaaactactgtatcaataatatctgtccctacttgcttcttcatttcctctcgtaacgcttcaataaaatcttcccatggtacttcgtatgtctgaaactgatctgtagatttcatgccttttcctccttatatatcctcttcttatatttcccctttcctataacaattatgatagatagggcattcgtacaagccgcacttgtcccccttacatatcgtattactgtaatgcggaaggaggaaagaatatgcatagacaaaaatgttatgatacatgccaacgttatttcggaaaagttgttcggattgaagaccgtgatggccgtatacatttaggtaaaataatcgatgtgacacaaaactctgtatggatcgaaccggtgcaacagcgctcatcttttgattcagggttcggatactacgacgcttatgcaaacggtggttgtgacctttgtggaggccttagcaggtgtgatagttgtggattcggatgcggtggtggattcagcagctgcggatgtggtggtcgtggttgtagtagttgtggttgcggcggctggggaggcggcggttgtggctggggggttgaactcggatttggtttcatcttcggaattacattagctgcattatttttcatttaacatagtaaagagttggctacctttagccaactctttttctttatttttcacatataaaaatacgatgccctaaaatgtgttggtacataagccgtacattttcatgctgtgcccacgcctcatataactcattcggaatatgtgaggatacattccattctggctcttctacatagccagagattgtttctgcaatcgtgccaccacccgcaattgtaattcttttaaaatttgctttctgaaataattgtacccactcattctcagttaacagttctttcatgccatataattgggcgattttttcttcctcacccttatcaatgtgcctatcaataatcatttcaatgacaacaagcttaccgtcctgctgtaatacacgataacactccgagataaccctttctttgtctgtaaaagcgatgattgattctccaagtacgaactcaaatgagttattcaaacacggtaaatgctctacatttccttcaattaattgtatatctaacccttcaaacaaccatctatcttttgccttttgaatcataatttcattcttttcaaccgttgttactttatagccaaattcccttgtcatatacgccgctgttttccccgtaccacaacctatctcaaggacattcgctccatatttaaaaggcagttgtgctaacaattgttttgttaacgtaaagccaccaggatgagcacttcctattccgtaataagctaggaaatcgatgtatgtgtttcgtttcatgggattctcccttttttattttatatattcgagcacggaagaaaagtgcatagaaaaaagggcgtattgtacgcccctcatcttacttatcctctgtaatatatgcccatttatagctgtagtctccaccaaccggatggtgaacaataccttttactttctgtctttgaacgatagcatcaccacgttgatataatggtgcaattacagcatcatcaagtaatattttctcagcttttagtaagctatcccaacgttctttcgttttcgttaatagctcgcctttacctttttctacaatttcatcatattttggatttgaatatccagtttggttatgaggaccatttgtaacgaacatatcaatgaatgtcattggatctaagtagtcagggccccaaccagcgtaagataaatcataatctaaatctgattctaattttaatttttgtttaaacggttgatttttcaagttcactgttaaccctggtaagtttttctcaagttctccttttaagaattctcctactttcttcgcattatcgctatcgtagtttaatagctcaatcgttacttgctcttttccaagttcttttttcgctttttcccaatgctcttttgcttttttcacatctgtttttaaaatatctccattttctttacggaagtcttttccatctggactcttagcaaattcttttggtactaagtaatctgctggtgtagatccgtcatttaaaataacgttcgttaagccttttttatcatatgcctttgcaatcgctaaacgtaaatctttgttctttaatactgtatcttgcccaccacgtttttggtttaaacgtaagaagaacgttgatggtgttttttgtgtataaaagtctggatttgatttatatttgtcaaccatttcagatgtaagtcccgcacgatcgatttgtccgctttcatataagtttacacgtgtaccgctatcttttactacgttaaagttgatttcatctaacttaactgttttattatcccaatattgtgcatttttctttaatttccatccttcttcatgtttccagtctgttaatgtaaatggtccgttgtataacgttgtatctgcttctaaaccaaatttttcacctttttcttttacgaatttttcatttaacggatagaatgttccgaatgaagttaattctacaaagtaaggaactggattttctaattctacctctaatgtgtaatcatctacagcttttacacctaacgtatcaagtggtgctttcccatcattaattgcttttgcgttctttaaatcaaacataatgtatgcatattccgctgctgtatttttatctaccgcacgtttccaagcaaacacgaaatccttcgctgttacagggtctccatttgaccattttgcatttttatttaatgtaaatgtatactttttaccatcatcactctttttatatgattcagcaactcctggtgttgctttattatctttatcaagtcgatataaaccttccattacgttgtttaaagctagaaacgatacttggtctgtcgctttagcagagtccatagatggaatctcttgagactctgttaaattaagcacttgcttcgccgctagctttccgccttctttttcaccgctttttggtgttgtgcttgccttctctttatctcctgatccagagcaagctgttaatgccatactcattactaaaactggtgctacgaccgctgtcaattttttcatcttttttctcttcatttttttgtaccctccccaattatatgtacgatattaacatttagaaattctctactaactttcgttatcagaaaattcttattaattaatattctactgtttttttaaattttgtaaagtatttttgtaaattttctaaatatttatttttttattatagtaacttgttgttttaactactatatgaattatcccccgtctactatatgtaaacatctctccccttattccactctattactacgttctatatttttcttattagcatgaggtctcttactatcatctgtattactacttactgacctctctaaattcctccgatagaaccttcctaattacctacccgattctcaatagactaacgagatttattcccttatacatactaaaaagcatttcaaaagcagctcagccacttttgaaatgctttcactttatttttttccgccatcctcagttacatacgcccacttaaagctatattctggactgatgttatgtttcacaattccttttacattcggtttcattacatacgatcttcctgtttgatataaaggaactaaccctgcatcttcttcaaggaataatttttcaactttccctaacgtttcccagcgttttttcgcatcactcattaattcattacctgcttttcctaccatttcatcgtattttggatttgaataactcatttggttgtacgggctcttcgattcaaacatatcaataaatgtcattggatccgcatagtctggactccaacctgcataagaaatttcataatcttgcgcagtttctaattttaatttttgtttgaacggctgaattttcgtattaatcgttacaccttttaaatttttctcaatttgatcttttacatagtcagcaatctttttcgcagttccatcatcatagcttagcaattcaattgtaacttgatcttttccaagttcttttttcgcttcttcccacgctgctgctccttttttcggattatatttcagaccatttttaaatgtatcttgataatctttaccatctggccctgtcgcaagtccttttggaaccaattgatctgttgcttttgaaccattatttaaaattacatttgccaatccttttttatcaactgataatgcaattgcttcacgaagttttttgctctttaaaggcgtatcttgtccgttacgtttttgatttaaacgtaagaagaatgtacttgattccgcatactcaccatattcttctttgttcgatttatatttatctacaaactctcctgatagtaatgtaaaatcaattgatcctgtatcatataagtttactttcgttgcaacctcttttactacactatagttaatttcttctaatttcacagtctttttatcccagtacttatcatttttcttcagctgccaaccttgttcatgtttccatgaagacataacgaatggaccattatacacagttgtatctgcttctaaaccgtacttatcacctttttcttttacgaatttttcatttaatggatagtatgatgggaatgctaataaatttaagaaatacggtaccggtttttctaattctacttctagcgtgtaatcatctaccgccttcgctcctaattcagttacaggtttttctcctttattaatcgcttctgcatttttaatatagtaagcaataaatgcatattctgctgcagtattcttatcaagtaagcgcttccacgcaaaaacgaaatctttcgctgttacaggatcaccatttgaccattttgcatcttttcgcagtttaaacgtatactttttaccatcttcacttttcgtactagactctgccgcagcaggaattggcttattatctttatcaaggcgatataggccttccatcgtgttccctaaaatttgcgaacctaatgtatcagtagatttagaagtatccatcgtcggaatttcttggttttccgtacgatttaatacttgtttcgctgcatatttaatatcagattttttttcttccccactatttgatgtagtagtcgttttcttttccccacctgacccagaacatgctgtcaatgcaacactcatcgctaaaactggtactacaactgccgttaactttttcatcttttttctcttcatttttgtaccctccctaattatatgtacattaccaacccttgagagaccccttactaaagatttatttttcagaaaattataactaatgttattctactctttttttcgtatttgtaaatagttttttaaatatcctggttttttttaatttagtaggatttatcccccatctactatatgtacatactatacaccttattctcctctatttaaccacactaaaaattagtattttaagctcacaaaaaaagcatttaaaagtagctaagccacttttaaatgctttttcaactctattatttttcagtcacatatgcccacttaaagctaaattctggactgatattatgttttactactccctttacatttggttgtaaaacataagaatctcctcgttgatataaaggtacaatcgctacatcttcttcaagtaatgttttttcagcttttcctaactcttcccaacgttttttcgcatcgctcattaattccgttccagcttttttcaccatgccgtcatatttagggtcagagaagctcatttggttatgagaatgtccagtctcaaacatatctaagaacgtcattggatctgcataatccggattccatccgccatacgaaatatcatattgttgttcagtttctaattttagtttttgcttaaatggttgaagtttaatgttaactgttacaccttttaagtttttctcaatctgatctttaatatattcgccaacttttttcgcattaccagtatcgtagtttaagaattcaattgtaacttggtctttacctagctcttttttcgcttcttcccaagctgcagcagcttttttagcatttggttttaaaccatttttaaacgtttcttggaagtctttaccgtctggtccagttgctaaaccttttggtactaagaagtcagcttcttttgatccatcatttaaaattacgtttgctaaattctttttatcaactgatagtgcaattgcttcacgtaactttttactctttaatggtgtatcttgtccatcacgtttttggttcatacgaatgaaatacgtactcacttgtgaatatgttccgaattcatctttcttatttctgtatttatctacgaactctccagttaataaagcaaagtcaacttgaccgctatcatataaattgataagagttgctggttctttaacaacactgaagttaacttcttcaagttttacagtctttttatcccaatattgatcatttttctttaattgccatccttgttcatgcttccaatctttaagaacgaacggtccattataaactgttgtatcagactctataccgaacttctcgcccttttctttaacgaacttttcgtttaatggataatatgatgggaatgctactaagtttaagaagtacggtactgcttgctctaactcaacttcaagcgtaagatcatctactgcttttactcctaattcagttacaggtttttctcctttatttactacttctgcatttttaatcgggaatgcgataaatgcatactcagcagctgtttttggatctaatagacgttgccaagcatatacgaaatctttcgccgttactggatctccatttgaccattttgcatctttacgtagtttaaatgtatattttttaccatcttcacttttcgtgctagattctgctgcagctggaataggtttattatctttatcaagacgatataatccttccatcgtattccctagcatttgtgaagatactgtatctgttgatttagaagaatccatcgttggaatctcttggtttactgttcgattcaacacttgttttgccgctaattttccctctgacttgctatctccacttgagtttgtgcttgtctttttatctccgcctgatgtagaacatgctgttagtgccatgctcattgccaaaaccggtactacaactgctgttagttttttcatttttttctttttcattttctgtaccctccctaattctaaacgatagctattaaagaattttctgataattctgtttttctctatatatttatcagacgattcttactaattcttattctactaattttttaatttttgtaaagtattattattgaaaatttttaaaaaattatttttttacagtaatattcataaaaattccatatgttgttcaaaccttattttgcattcatacacattcgttgttttaatcacttcgatctcatttaccgcttgaatactggttaattattgctaataaataatgcatatatgtaaaaacatcttttctacaaaaataaaaaagcagacatttcgtctgctttaattctcctcaatttgcttttcacttaaccctagatgtgttctaagagtattactcaaactctgtagatcttttttattaggattataataatatacacgtttcccgtttgggccattaggtaagtataaatcatcaccagctaattgtattttttcaactgaaccgtttaaaccgtatttataaaaagataaaatatcatccattactaaatttgttttaaaatcaccatcaaccgcctcaactattttttctagcttcgtaatcgatcctacactttttaatttacttaaaatcgcttcaataacaagttgttggcgctgtcctctcattgcatcactatcaatatggcgcgttcttgctagtgcaagtgcttcttccccatttaatttttgtaatccttttttcaaatgaatcgcatcaggttcatctttactattttgctccgtaaattcaactgggacatccacttcaataccatctaacccatcaacaattttagtaaaggaaccaaaattaaatttcacaaaataatcaacaggcacctgtaacaatttttctaccgcttccacagaagcttgcggtcctccatctttaccatttttaacgaaaccacttccatatgcatgggttattttatcttttttcttttcaactggaacatatgtatatgtatcacgcggtatgcttgttaatttcactgttttatcgtctttattaaaagtcgctaacaataatgcatctgtatgaaatgcaccattatattccttttgtcgttcttgattttcatcaattcccataattaaaagtgaaacatgatttgcaattggctttacagatttctcacgtaaattggatttttcacctcgtgctaaattcaaattagatttttgtacaagactagaagttttcatatatacataggctccatagccaattccaccaaatagtaataccgccagtagtaaacttgttatctttttctttttatatttttgcttatttttctcttctcttaaagatgaatgattccccatttactctcctcctgtttctattgatccaatatgtttctcattttttcatatttagcgctatccttttgaaacatactttctttcaatcccttatctatttgtatccattcagtcgtaactgaatattgaatcaagccttcttgaaaactaagaaatttcaacataatccctgtatttttctccacaaccatttcgaatttccctcttaaatcttcagaggtgctaacaggcatctctatgtttataactccttcaattttgtaacaatctaatccaagatatttcgtttctttataattccaatctttatatcgaattaataaatctgcgaattctgattgaatactatatttagctagccctacatattcatcatcatatctctttttctcatctgattttctcactaacctttccgtaggatttaattttaatagttcattgtttctttctttcgggttccattttgtctctttataggtatacttctcatcatcaaactcttttttcttgccctcgttatatataattgttcgttttttggctagtttatcttctttcgaagagatacctctttgtttctccgtatcaatcgcatacttatatgttgtagcaattcttgatgagctagaatattcctcaaattgtcctgaaatatttttaaaataatcaatagaatctagcattttttgatgaatcttttctttatctggataatgtacattcgattttatttcttcttcattttcataatcagaaaacgcttttttctttacatattcaaatactccaccattttgcgcaaaactttgtatagaaaactcagacatagataccactgaaagtatacaaaccgctgcactaattatcatcatatgaattttgtaactcttcttttttaccttaagattatgtagcgtaccattaatcttttcatttaactctggaggtactataacattttcatctttgattctcttttttaatttctcatcaaataatttttcattatccatcctttacaccccctattccatctttaatcgtttttgtagttgttccctcgcgcgtgataatcttgatttcactgttcctttcggtatttctaacagctttgctatactctcttgattcatatcttcataataataaagcaccgtaacagctcttaattcttcatgtaacgattgaatcgcattacacaaatctatatcttcatactgatcacacgcactcatattgtaatcattctcttctgtcacaattacatttttatacgctctaataatattgttacactcatttattagtattcgaattaaccaagtgtgaaaaaattcttctttttttaatttttttatattttcataggcttttaaaattgttgtctgtatcgcatcctctatatttgtctcatcacgtaacatcgcctttgctattcgatacatcttcactttttctgtatgtataagcgctataaaggcttcatgatcaccttttttcgctaaagaaacatccgtttcttcttttataaccattttatataaagggattactttcacaatcgctcctcctgcttcatcctcacttcatcacttccaatttaactttacatgtattagacgtatgaacctagaaaaaggttcacttttttgaatatttttgtaattaaaaagataaatatcctttataaggatgcaataaacatactagtttaaatttacaaataaaaaaagcccactttctcagtggactttctactctataacggtaaatccctcttcctaaatactacaatcgctacgataaaaatacaaagcgctacagcagttaaacctatgcttaccggccatatattatatgatccttcagcaatttctttcggacgaaacagcgtgaataatgataggtttttcatccattctaacttatcacttaacttccctaccatatccaatacgaaaaataagatagttaaactcgctgaataacttagtgcttttctttcgtcattacatatacaagaaaagaaaaatgaatacgcactaacgactaaaaatatgagccctccgactacatttatcttcaaaaataactctttatttaagttattatcttgtaaaaaccattctgcacctactaacccagctacatacgtaacagatacaataatcagaagtcccaatatgagaacagcagcttgtgtaatcgcaatttgcactctagatacaggtgttgctagcatgtatgccattgctcctttatctacatgacgagcaattaaatgtgtcgcaactgttacgcaaaaaattgttaaaatgataataaacaataaactatagtattcgcccgctagaaaatccattacgttttgaatcggactttccataccaacgatttttttcacactatcaggcatggcacctattaattcatttagccctttcgctgataccattgacgggaatatccaaattaataaccacagatataaagctgcaccagacgcataactcaaaatacttttttgtgtttctttcaaactagctaaaaataattgcttattcatgcgttatcccttctttcttatcgtaataatgcataaataaatgttctaaatccatcgctctcgtttgaagtgccgttacattgtagtttgaaagtgtttgtaaaacagtttgatagtttccttgtacaatgatagatgcctctctgccttttaccgcttcaaattgcaaattacactttgtaagagactcaatctcttcttgtgatgatactgttacatctatcacttgtcttctcatactttgtaaatcgtgaatattttcaactgttacgagtcgaccatctttaataatagctactctgtcacaagttctctcaatttcagtgaaaatatgcgaagacataagaattgtttttcctctttgcttttcctctaatattaaatctataaacacttgctgcataagtggatcaagtccagatgttggttcatctaaaattaacacctctggatcgtgcataaatgcagcgactatccctactttttgcttcattcctttagacattttgcgaatcggtgttttcacatcaaattgcagacgctctatcagttcatctcgtcttttcgtatcctttaatccacgcattccttgcattaattttaaaaactctaatccgttcattccttcaataaaagaaatttcacccggtagataaccaacttccctttgaattttcgctgcttcattccaacaatctaatccgaaaattgtcgctttaccagctgtcggttttataaatcccattaaattacgaatcgtcgttgattttccggcaccattcggtcctaaataaccaaatacttctccctcttttacatcaaatgtaatatgaaacaaaccttttccattcgaaaactgttttgtgacatcttgaactgaaatcataattccacctcattttttgaaatatttaatatgtgatatttcaaaattattgtactcctcatctttcatattcgcaacaactttttgaaatatttatcagtctatatttcaaaattattgttttccattattttttcttgtatattttaagtgaggtgattgcattgaacggctttgaaagagtaaaagaaaagaaaaagcgtgccattaaagaagcagcattcttattattttcagaacgtggatttaatgaagtgaaaatagaacatatcgcaaaagaagcaaacgtttctcaagttacaatttataatcatttcggaagtaaagatgcgttatttagggagcttatacaagaatttatcatatctgaatttcaatattataaagagcttgcagaagaaaaattaccttttcatgatatgatgcaaaaaatgattgtaagaaaaatgaatactggcggattatttcaacctgatatgttactacaaatgatgcaaagggacgaagaactccgtaagtttatttatagttatcaaaatgaaaaaatcctaccctggtatttagaaatattagaacgagctcagcgcaaaaacgaaattaatccacaccttactaaagaaatgatgttactttacattcaaatgtttacaaaattaggtgatgaatttggagcacaacttcttgaaggagattgggaaaaacatataaaagatatcgttacgatgttcttctatggtctttctgttccacaaaagtaatttttctaaagaacaaataaaatcatcaaaaagccctttggatatttaaatcgcaagggctttttcatatcaaaaaatgactaaaactaactttatcttaaagaagttaaatgctgctttatagataacaccttattatagattaactcttttagcatcacaggctgaattgaaataatcgtttcaccaaaatttagaaaataacttgaaataaactcaacttcttgcttgttaaaatagcctgttatactataattttcattttctttttgtatcctcatggaaggataattctctttatcaaaaatgtcctttcctttttgattaacaatgacgctaaaatcaattgcatcaggttttctgtgaaagtttgtaagataacttaatagttcttcaagattttttgaattcgtgttgcttgtttcctcaatagaaagaattttatcacatctaattatttgaacaccatttgtctcaaaattaaagattttagcataccactggccaaatttagattcgattcgaataaattgggcgaccaatactttctcctcatctttttttaaatatgttaaataataaactcgctcagcaaaaatcccctgtaaaatttcttttaagaacggactaaaattactatgatttgttacttcaaaggaaagcgttcgttccataatcgaaatgtttttactcacattatcaggtagtacatgtttaaatttattttcaagcgcaatactttctatattaaatggttttgtcttgtatccatttagtgtaagaatcgaaaagtataacgcatacatttcatccacactaaaataaattggcgataacacactattttctataattttataacttccatttctacctagttcagaatatatgggtacacctatttcttccaatgattgaatatctcgtaaagctgtacttttagaaatatcatatctaaccattaaatcttttaaattaaaatttcttttattatttaagaaaataagcatatcatttattcgttccgtttttttcatatttacctcccgaaaggtgtcatgtattgaaacctttttagtctatattataattattaactaataaaggagttgtaaatttatgacattagaaatagctatttttctctcactgaatgggcaagcaaaggaggcaattaacttttatacacgtaatttagaagccaaaaaattaatggttgttacgtatgaagaactggcgaaaagagatcgttcttttaaaattacaagtgaaaataaagaacatatcgctcactctgttttacaaattgggaatacaaagctaatgatagcagaagatacaatgaatactaatgaacgttataacgttggaaataacatgtcactttgcattcaaagcgctaatttagaagaaatacaaagattttataataatttaatttccgataagcatgtgaaaataatctctccgctagaaaaaaatatatttagtgaagcatatggtattattgaagatccttatggcatacaaatccaattaatgtatgataaacgactaaactaaataattaatcatattcacatattcctaataaaaagacacgaatttcgtgtctttttattttatagaaatgactctacctttttcactgctttcaatcgctaattgaatcagtttaataacatctaaaccttcttttgctgttacaggtagtttctcaccatttaatatactatctcgtacacctttataataattgtcataacaaccgacttctgttggaatacgctctaagctttcttctgtttctaaagtagcaaaattctcttcatcgtctactccataaccgttatcacctggcttcattccattttttaattgctcttcctgcgaatccataccgtacttcacgatagaacctttctctccatgcactataaaatgcggtccagcttttttcacataactgctactacgtaaaatgacacgtttaactccgtaatgaagtactatgtggaaataatcatccacctctgcacctggtctttgttttattacatctgcacttatcgcatcgggtttcccgaatattgataacgcttggtcaattaaatgcgatcctaaatcgtataatataccggagcctggtagatttttttctctccatcgatcacgtacatgtggacggaaacgatcaaaattcgattcatatgcgtatacattccctactctgttttctcctaacaatttcttaattgttaagaaatcattatcaaaacgacgattatgatatacgcttaacattatattatgctgctctgctaatgaaataagcttttccccttcttcaattgagacaacaaatggtttttctacaacaacatgcttaccgtttaaaattgcttcttttacatatggaaaatgagttgtattaggtgatgtaataacaactaagtcaacatcagctcgcttcaccaattcatcaattgtactaacaacattagcatttggtaatgtttcttttactacctcttcttttgaggataatacagcacgaatatcatattcttctatcgtttgtaatagtgggatatgaaatgtcgtactagaaaaaccaaatcctacaatccctacacctatttttttcatgttgcccctccatttgtcccgctttaacaggcagtaagattcctaactcaaaattcagcgaaaactaaggaactaggtgaggaatcaactgctcgttaaagcccgattggtttaactaataatcagtgtggataaagaaaatccccattgattaaagtttcactttatgagaacgatttcattcagttattataacaagattattattatttatataataaattgcctagaaaaaagcatcttgctattattcatagcaagatgccctctttattctggtcttttcttcgtccacgtttctactacttcaccagtatcattaacatctagcactaggctaccattactataccggtctttatttcgatacgctttcggatcaatctcttctacaatgtttttctctgtcttcatgtaaactaattcatcgtcccgaacaatttcaataccgacaatgcggtacggattacgttttaattctttgaaaataacaagacctcgtttcgccctcgttgatttttcaatttctgatgcttttagacgttttacagcaccgcgctgtgttacgagaataagttgatctttgtcaccatttaacggtttaccagaagcgacatagtcatcttcttttaaattaattgctttcacgccagcagctcttacaccgactggacttacttcatcttcatggaaaataagtgcatatgcaccgtgtgtagcaagaacgatatcactcgttccatctgtcgcaaatatatcgacaacttcatcatcttttttcaagtttacagcaacgaatgcccttgaataacgctgaactttatattgatttaattctgttttctttatcataccatttcttgttacaaatacgataaatcgtttttcttcctcaaagttcggtacaaccgttgcccaaatgattgtttcatcccggtcgagtgaaacgatattagcaacgtgctgacctaaatctttccaacgaatatctggcatttcgtatactggcagatatatatagttgcctttattcgtaaataagaggactgtctctgtcgtattcgtatcgaatcgttcaagtaagatgtcaccctctttcataccgaagtctttgccatttgaggcattatgtgagcgccatccagtacgtttcacatatccttctttcgttacagtaacgatgacatcttcttgtgggatcatcacttctacatcgattttaatttcctcgatttgatcttcaataattgcgcgtcgatcatcactatatgttttcttaactctctttaaatctgttttaattacttgaagtaatcttttttcactttgtaaaattgcctgtagctcaataattttcttattaagctcatctgcttcttcttgtaacgccgtaatgtctgtattcgttaagcgatataattgcaaggaaacaattgcttctgcctgtgcttctgtaaagccaaattttgcacttaaattatctttcgcgttacgtttatcttttgaagctcgaattgtttcaattacttggtctaaaatcgataatgctttctttaaaccttctacaatatgttgacgattttctgcttttcttaattcatattgcgaacgtctcgtaataacctctttttgatgtccaatataagcatctaaaattttcggtaatgtcataagtgttggacgacgattattgatcgctaccatattaaagttatatggaatttgcaaatctgtatttttatataaataatttaaaataccttcggcgtttgcttctttctttaattcaacaacaattcgtaaaccagtacgatctgtctcatcacgcacttcagcaataccatctaactttttatctagacgtaattcatccattttctttacaagatttgccttattcacttcgtaaggaatttcagtgattacaatttgttgtttcccaccgcgcactgtttcaacttctgcttttccgcgaataataattttacctttacctgtttcatacgcctttttaataccatcaatcccctgaataataccgcctgttgggaaatctggtcctttcataactgttaataaatcatcaacagtactatttggcttatcaatacgcatcattgtagcatcaataacttctccaagatgatgcggaggaatttctgttgcataaccagcggaaatccctgtagatccgttcactaataaattcgggaacgctgctggtaatacaaccggttcttcactcgtatcatcaaagtttgacacgaattcaactgtttctttatcaagatcacgtaataattcagatgcgattggtgataaacgagcttccgtataacgcatcgctgccgctgggtccccatcaacactaccgttattaccatgcatttcaactaaaacattacgtactttccaagtttggcttaagcgtaccattgcttcatatacagaggaatctccatgtggatgataattaccgataacattacctactgttttagctgatttacgaaacgctttatcatgtacattgccttctacatacatagaatataaaatacgtctttgtactggctttaagccatcacgtgcatctggaagtgcacgatcttgaataatatatttactataacgtgcaaagcgatcacctaacacgtcttcaagcgggaggtcatgaaacttctctgcttgcatgttattccacctccgtctccataatcatttcattttctaaaatatttccttcttcttgcataccaaactgtacattacgttcaatccatttacggcgcggttctactttatcgcccattaatgttgtaacgcgacgctctgctcttgctgcatcatcaattttcacgcgaattaatgtacgcgtttcaggattcattgttgtttcccataattgatccgcattcatttcaccaagtcctttataacgttgtaacatatagccttttccaacttttttcgttacaccgtctaattcctcatctgaccaagcgtattcaattacctcactcttaccttttcctttacttactttgtataaaggaggaagtgcgataaacactttaccagcttcgataagtggcttcatatatctgtagaagaacgttaataacaatacttgaatatgagccccatccgtatcggcatcggtcataattacaactttatcgtagttaatatcttcaacatcaaattcatttcctacaccgccgccaatcgcataaatgattgtattaatctcttcatttttaaagatatcagcaagctttgctttttctgtattaattactttaccacgtaacggtaatacggcctggaaacgtcggtctcgtccttgtttcgcagaaccaccggcagagtcaccctctactaggtacagttcatttttttgcgggttacgtgattgtgcaggtgttaatttcccgcttaacgtaccttctgattttttctttttcttaccactacgcgcttcttctcttgctttacgggctgcttcacgggcttgtgctgctttaattgcttttctcacaagaagtgtagctacatcaggattttcttctaaaaagtatgctaaatgctcagatacaatggcatcaattgaagaacgcgcttcacttgtacctagtttccctttcgtttgcccttcaaactgaagcacttcttctggtacacgtaccgaaacgatagccgctacaccttcacgaatatctgtgccttctaagtttttatctttttcttttaatagtgctactttacgagcatactcgttaaacacacgcgtcatcgctgttttaaatccagcttcgtgtgttccaccatcttttgtacgtacgttatttacaaacgataaaatgttttctgagtagccatcgttaaattgaaatgctagttctgcttcaattccattttgttcaccagtgaaatatacaactggatgaatggaatctttttcttcgtttaaatatgaaacgaaagcttcaattcccgtttcataatgaaatacatcctctaaatcatttcgttcatcttttattgaaattttcattccttttaataagaatgcagattcacgtaatctctcacataatgtttcataattataatttgttgtgctgaaaatcgttgtatctggtttgaaatgcatcgtagtaccagactctttcgtcttcccgattttctcaagcgtcgttacaggaacaccgccattttcaaagcgttgttcgtaaatatttccgtcacgcttaatcgttacgactaaccattctgataaggcatttacaaccgatgccccaaccccgtgcaaaccaccactcgttttgtaaccaccttgaccaaacttaccaccggcatgaagtacagttaaaataacttcaggtgtaggtttcccaagtttatgcattcccgtaggcattcctcgccctttatctataacgctaatactattatctttatgtattacgactgaaatttcgtcgccaaatcccgctaacgcttcgtcaacggagttatctactatttcatatactaaatgatgcaatccacggctgtccgtgctcccgatatacatacccgggcgttttcgaacggcttcaagtccttctaacacttgaatcgcatcttcattatattggaactgatgcttcgccaaactccttgcccctttcctaatccaaaatcagaacatatgtttctattatagaataacgcctcgactatagttttggcaagttatcttatctcttttatataccattttcaatagaaaaatccttgttttctcacaaggattcctctaggctactatttcagaaaaataatcgtttgtcaacgagaaatggatatgtattccaagattacacattccaaacctttattatgatccaaatgatcaagatccaaaatgggattacaaataacaacccccaaaaacagcctttaaaaaatctcatgatgaacacctcgttcatcggccctacttatctataatgagggctgaatcaatctttctacctttaaatctatactattttgtcatcgcatgttctactttaatacaacgatccattattacagtatagtctttttcttttaaaaatttgtatgtatcctcatcttgtactcctaattgtgcccaaaaaacatctgcatcaatctctacaaattcttttgcaacatccattaaaaactctgagcgacgaaatacatttacaatgtcaacgtgttccttaatatcctttagtgaagaaactgccttttctccaagcacctcatctactgttggattaactggaataatgcggtatccagcatcttgcattgcttttgaaaccatatacgatgtacgttctggcttatctgataatccaacaaccgcaattgttttgcttttctttaacacttcaccaatttccgtacgagttgggttttcaattgtcataattaatccctcctattcctttagtatagccgataaagaaagtctctttcaatatgaaagagactttcttttatccactatttgcggataaccttactaattaaggtttaaacttattgattcttagtagttgaattatctgctaatgtagctgttttcgtcattttttggccgttgcgatagaatgtaacttctactttctcgcctacttttttcttttcatataaatatttgcggaattgaagtgaattttctactttttggccatctaatgctactacaatatcatattgctctaaaccagctttttcagccggtgatattgggtaaattttacctaatacaacgccatttgttacctctttcggtactttcaattgatttactgcataagcttgcacatcttctaatgaaacaacacctacgccaagtgctggacgtttcactacaccatctttttcaagtgattcaatgactggtttcgcaatattaattgggattgcaaaaccaattccctctactgattgctgagctattttacttgaattgataccaattacctcaccgttttggttaaataatgcaccaccactgttacctgggttaatcgctgcatctgtttgaataacttgtgcttgccaatctggtcgtttatccccatcaatatcaactggaatttcacgttctttactactaataataccttccgttacacttccatcaaatcctaacgggttaccgatggcaattgctttctcaccagcacggattttacttgagtcgcctaaacttgcaactttattcacattagccccatcaatttctacaacagctaagtctaaccaagggtccttccccactaatttcgcatcaacttgcttttcattgcttagtttaacagcaagtttattcgcaccatctactacatggttgtttgttacaatatatgctttatttcctgcttttttataaataacacctgatcctgtaccagctgtttgctcttgacctgtcggttgcattgcaaatggatctacactttgttgcatattaataacacctacaacaacatctttcgccccttcaatcataccaggtaaatcagtttcatttttcgctttatttacaactggaactacagtaccttctacttttgaatccgaactaaatgatgatactggcgctccattattttgagcccatggcatatatggtgctgcaaaactaatcgaaaccgctccgactacagcccccactaaacctgtgaagaaatagccttttttactacctgattttctcacttctctcgtctcactatgctcttcatttaaatttggtccgtcgtaatatcccatgttttatttcccctctctggtgaattcgtattttcagtatagtcacgttttgtgtccttcttgtgaactcatcgtgaaatctaattaaaaaaatactcctatctaacattgtagacaaaaaaagtattttttgtacattctaccttcaaaagagagtataaaatcgccatttccctaggctaaattacacaaatcgttctagattattcttcaaatttataaccaactcgaataacagtaccgatatgcttcgctttatctcctagcttatttcgaagttttttaatatgggtatcaaccgttctgtcatcaccgtaatagtcatatccccataactggtctaataaatgttgacgtgataacacaattcctttgttctccattaaataaacgagaagttcaaattctttatgtgtcaatataatttcttctccatctactaaaacagttctagatagacgattcacttctattccagctaaagacatagcattttcttccgctactcctaccgcaccatccgcacgtttcaataacgtctttgcacgagctactaatactttcgggctaaatggtttcgttacatactcatctgcacctaattcaaaacctagcaatgtatcatcctcatccgaacgtgctgtcaacataataattggtactgctgattcttttctaattcttctacaaacagaccatccatctatttccggtaacataatatctaacataattaaatcaatttcatgctctgcaaataactctaacgctttttttccatcttctgcttcgattacttcaaaaccttcattacgaaaataatcactaacaatttcacgtaatcttctttcatcttcaacaagcaatactgttttattcatataatctatcccgcctttttactctttcaatcgaataatacgttgattggagcttccgcgaaatggaagtgttaaatcttttttctcaatttcaaaccttccatcgactaaaacatccccataatgtaacaactctatcatatcattattttgagaactctgtatctcttctaacgtataacctgtatacatccataggttttttttcaaatctttcacgatttttgctacctttttcacttcagcagcttgaaaaaatggatctccacctgaaaatgttacatcagttaatggattacttgcaatctctttcacaatttcttctactgtcatttccgttccattgcaaatattccacgatttcggattatggcaaccaacgcaacgatgcggacagcccgcaaaaaacacgactgtccgcaatccttctccatctactacactatcatgaataatattcatcactttcatttatgtttcacccgatctatctcttcactacgtttcgcactattccacttcgacatatctcctacaagatagcctgttatacggcgaattctttctatattagcctcatctttattcccgcaacttggacattcattcccaataaccccgtgataactacagcacttacaacggtcaacaggatgattaattgaaccgtatccaacgccatgttctgccatggcttgtacaatttgttttaatgcctttttgttatgcattgctgctccatctagttcaatataagtaatgtgtcctccattacagagagcgtggaacgggccttctaaacggattttatttatagcttgaatgttataataaactggaatatggaatgaattcgtatagtaattatggttcgttataccattaatttcaccaaattcttctctatcttttttcacaaacttccctgataatccttctgctggagttgcaattactgagaaattcagttgatgttcttctgtcgctttatccattctatctctcataaaggaaataatttcatacccaagtttccatgattctccatcttccccatgatgctttcctgttaaagctactaaacattccgcaagaccgataaaaccaatacttaacgtcccttgttttaaaatcgaggctacggagtcttcaggctgcaacgtttctccaccacgccatacaccttgtgaatataaaaactgaaaatctcttgctcgtttcgtacattgatacgcatatctttctaatagctgcttaattcctaaatctaaataatagtttagcgcttcaaaaaacgcttcttttgaaccactaattaacgctaatttcactaaattaatagacgtaaatgataaattccctctaccaatcgctgtttcttctccatgtatattagacataacacgggtacgacatcccatgtaacatacttcactttccggtcttccatcataatgtactgcattaaacggagcatctaaaaatgaaaagttagggaacaatcgttcagccgttgtctctaatgctaattcaaataaatcgtagttcggatcactttcttcaaaatttacaccttttttcatcttgaaaatttgaatcggaaaaatcggtgtctctcctttaccaagtccagcttgtgtcgcttttaaaagttgtttaattaacattcttccttcttttgatgtatctgttccataattaatagaaataaatggtacttgtcctccgcccctactatgcatactattcgaattatgaacgaaagcctcacacgcttgatacgtatcattttccgtttctttccatgcaaattcctctatttgttctttcgtaagcggatatgattgtaatcgttttttatgtctctcaattgtttttcgtacataaggtgctaaatcaatatcaaagagtgcaaacgattgaccaccatgctgcatattttgattcgcttgaaaaataatagacgaaagagccaatgcacttttaatgtcttgcggttgtctcatatgtccatgtccagtatgaaaaccgttagcaagcatttgcgctaacggaatttgtgaacaagtcgtcgttcctgtcgcataaaaatctaaatcatgtggatataatatattttcatttatcgcttttttcacttgatctgacaataaattctcaacagcataatattttgcactctcagatgcgaacgttcccattacgcccattggagagcggccgtctacatttgcattttcttgcattaaatcttgttcattgccgtggactattgtctcgaacactttcattaattcttcttctccacgtgtattattttgtaacatttataaccctccaccaatatgttgttatcttttgattaaaatgttactacatatagtcttactgtttctgtgagaaatgtaacattactgtgaaatttttttcacgaaataatgaatttttcatttacaaaaaagaaatgtgctctttacaaatgtatggtacaatatacgggaaaaactctttttaccctttatcaacacatttgaataaaggagactgaacttatggttactacatatcttttatttatcgttgcctacttacttggctcgattccatttgcactagttgttggaaaaatcggctacggaatcgatattcgtgagcacgggagcggtaatctaggcggaacaaacacattccgcacattagggaaaaaagcaggttttaccgttacaattgctgacattttaaaagggacattagcaacaagtctaccaatgattttcggattagatattcatccactatggttcgggttagcggctgttcttggacatgtctatccaatcttcgcgaaattccgcggtggtaaagcagttgcaacttctgctggggtgctattatgctattcaccagttgtttttgcaatattggctgttgtatttttcacccttttatttacaacaagatacgtatcactttcttctatggtaacagcagttgttgctgttattgcatccattgttagcggggataaaatcttcattattgcgatgtgtttattagcaggtatggttatttataaacaccgtgcaaatatcggacgaattataaataaaactgaaccaaaagcaaacttttcaaaaaagcaaaaataagatcgtaacccacataacgcaaaaagaaaacgtgaagcatattaatagcgtctttttgcgttattttttatactaaagaaaaagcaacataatttggaggaactatacatgaatctttccgtaacaaaagaagcagcacaatggtataaaaatgaattaaacttacaatcaaatgaaacactacgctttttcgtacaatacggtggttgcagtactgtgcaaaaaggactttctttagggattcgtaaagatgatcctgcacatcctgctgttcaagttcaagaagaaggtattaacttctttattgaaggcgatgatgaatggttcttcgatggacataatttatctgttacacttaacgaaggtgacgacttcccacaatttaattatgaaaaataaaaaaacgtggcttctgccacgcttttttattttttcttaatttcctcatatttcgcataccactcaggatataactttttaaatgatacagggcggaacccttcttttttcgcacaaatattcgtcgtacttgcagtaatacaaagttcaccatcaccattatatatttcatatccatatacaacgcgaagtgggctcacagtatctacccatgtttttacgattgctttttctccgtaacgcatcgctttacggtatgaaatttgtaaatctaacacaggagaaataattccttctttctccatttcaacatatgaaaaacctaaatcttgtataagtttcgtgcgacctaactcaagccacactaagtagtttgaatggtaaacaacacccatttgatctgtttccgcataacggatttcaacttcatgttctgctacaaacatatgtatattcgccgttgccataaacttataaaaatctataatttttgtttatttccctgttctacgtgtccgatttcacagaagctactttcgtttgatgtaacactccgagggcgtaaattcggatacaacgaatcctacatattagccgtaacttttttagatgttaactggctaattcataccgtgacaaattgatagccgcatttaaatccctatccatttcgtgaccacaagtgcatttgtatacacggtcagaaagttttagttctttgttaatgcttccacaactggaacacatttttgaagaaggataccatgtatcagcttctacaaattcaataccatatttttcacacttgtattgaatttgtcttttgaactcatataaacactgcttcgcaatcgctttagctaggtatctattcttcagcagacctttcatatgcaacgtctccatcacaatgcgaaatggcttggttttcacaatttcgctcgtggattgatgaagatgattctttctgatatttgataaccttctatgtagttgtcgtatctctttctcgatttttataatattgcttgttttgacaaaacggtttccctccttattcatttcatatttacgagaaacttgacgttgcaacctacgaaggcgtttctctacctgtcttaccatttttgttttgttgatattgttcttcctctgcccatcagaacaatatgctaattctttgattccaatatctattcctaacgaaacagccgttaatttctcttttgtaaactcctgttcaataccgacagacaaataccaatacttaccgtcaaagctaacgcgtggattagagtacttaacccctacaggtaacttttcggatgtttttacccaaccaactttctcaatcaaaacttgtttttcttttacttttaacttgacattatcattgtaaaaagagagttttgctttccttctgcttttgaatcgtggtttatcagccagtcccttgaaaaatcgcttatatgcttcacaagcatctttaatcgcttgtttggctatattatttgaaacatcgtacaaccaagcatattcttcagactgctttaatacagttaattctttccgtaaaaaaacgtctgatatgaactttccgccattcttgtaattctcttcttgcttcgccagtgtccaattataagcccatcttgccgtaccaacagatttccaaagttgcaattcttgttctttattcggcttgattctcactttcttcgcaagcatcattttccagcaaccccttaaccatcttcttagcttattttcccttgaagatggcaactagtttgttctatcctacctgcctttttttgcaaaatcaccaattgaatatactttcatatttttcatcccatgaaactactttactccggcgacaatttttcatctacaaatattttatcactaattatatatttttgtagatatacactaactgtttcttcccttctttcacttctgctaccttgcatacatttaatcataatacagtgacatcaaaaataaaataaaaatagtgaatcttttcccgaaaggagcaagcatatgattcaaattgtaacggttcgtagcggtgatagcgtatatagcttggcatcaaaatatggatcaacacctgacgaaatagtaaaagacaatggactaaatcccgctgaaacgctcgttgttggtcaggcacttatcgttaatacgaaaggaaataattattatgtacagcctggtgacagcctctatcggatttctcaaacatataatgtccccctcgctagtttagctaaagttaataatttatctttaaaatctattctccatgtcggacaacaattatatgtaccaaaaggcacaaaacgagctgtagaatccatcgcttatttacaaccttccactataccgattaaagagagtttagttaatgctacacgtgccatcaatccatttttaacatatttagcttattttagttttgaggcaaaaagagatggcacattaaaagaacctactgaaacagctaaaattgctaatattgcaacgcaagggcaaacaatccctatgctcgttattacaaatattgaaaatggtaatttcagtgccgatctaacatcggttattttacgcgacgcaacgattcaaaacaaatttattactaacattttgcaaacagctgaaaaatatggcatgcgagacattcatttcgatttcgagagtgtagcacccgaagaccgcgaggcgtataatcgctttttacgaaatgtaaaaacacgcttacctagcgggtacacattaagcacaactctcgtaccgaaaacaagttcaaatcaaaagggaaaatttttcgaagcccatgattataaagcgcaagggcaaattgttgatttcgtcgtcattatgacatatgactggggttggcagggcgggccaccaatggcaatctctcctatcggtcctgtaaaagaagtacttcaatacgcaaaatctcaaatgcctccccaaaaaattatgatggggcaaaacttatacggattcgattggaaacttccgttcaaacaagggaatccaccagcaaaagcagttagctctgtcgcagctgttgcacttgctcgtaaatataatgttcctatccgctatgatttcacagctcaagctccacattttaattactttgacgaaaatggcgtacaacatgaagtttggtttgaagatgcgaggtctattcaaagtaaattcaatttaatgaaagagcagggcattggcggtattagttattggaagattggcttgccatttccacaaaattggcgtttacttgttgaaaactttacgattacgaaaaagggctgacaaaagtcagccctttttgtacattttgttaagattcatctttgatttcactttttaatgagtcaatactttctaaacgtctttgattttttgcttcaatagcagcacgatctttttcattagaaagttccgctgtttcttttgcttcattaaagttatcaactgtattttgcaccatttcttgtaacttttcagcgttgtcacttcgattatctggatttggcatgtacttccctcctaatattgtatatacacaccatcttaaattacctatctttcctcaaatttatacataaaaaaggagaatgtaatattctccttttctttaaccattatcaacaatcggttgtttacctgtttgatcttgcatttgctttcctttatttccaccagctttttttgattgtgttccaatatgattcggtgcaaaatcttttgaattttttttcggattacccattactatcgcctccttaatactagtatcgtactagtgttaagaattattcagcttgcttaaaaagtttcatttcataacgtttttcaatgcgctcttcaatgcgatcaattgcctcacgatcgcttaataattgttgtttattttcatttacaagttcttcaaacgatttacggcgacttcttctcatgttgttcaccctctctccttcgctttcttattacatagtatgagcaaacaaaaaactctttaatcagatttgcaagaaaattttatgttttagtactcctaaaaaaactccgtgtacaatatattgcacacggagttttttataccataatatttaaatactctttcaacttttcatctgcattcatttcattttctttataatcatgaagcgcctgtaatacaaaatcatactgctctaaaatataactttctaatttcataacatcctctaagctattaagcataattctcgtattaccagcttcactttttaacgccggttcacattttaaacttgtacatatttctttcacatcttcttctaatatctctgttaatacatatttctttcgcccttttacctttaatctcataactggataaaaagcttttatatctaaataacttcctacgttcatacaacgtagccattctacattacgtttattacatgcaagtatttctttcaccgcttcatataccgcagtttcatcaagcatagccttatttacttttcgtttcccttcttcttcaatagctgcacacttttgataaacagcagcacacgtaatgcaatcgtcaaatgcattatgagagcttaaacgaattccaagcattcgttttaacgtttcaagtttatgattaggcgcatgcttcatgtatttctttgctaaaaatacagtatcaattactttatttttaggttcaggcaacccaagcatatttacattacttttcaaaaagcgcatatcaaaagaagcattatgggccacaataacatttgtatgtaaaaatgctaaaaataaaggtaacacttcttcaatcgtcggtgcatctgaaacgcgataattagtaatacctgttaaactcgttattcggtccggaattggccgctctggattcacgtatgaaacaaattgatctactaattcatgattacgatatttcactgctgcaacttgaataattttatcattataagggttaaatcctgttgtttcaaaatcaattacaacataatctaacggtaaggatacattccccactccatacactcctttatctctaaacggttatatttcttacatcatatcatgaagtgattactacttgaaaaagaaaaggcagaaatgggaactctccatctctaccttttcaccattattttaatttagcaactcttttctccatctctttttgtgtcatcggcccaataaacttatcttgaatgacaccttttgtatctataaaatacgaagttggaatcgtaattactttataagctgttgtcacatcaatgttcttgtccaataaaataggaaaagtaattcctttttctttagcaaaattgcttaccttctcttcccccccacctttttctgaaggcgtataattgaccgctaaaatttctacgttctctttatgttctttatagaaagcctccatatcaggcatttcttgctgacatggtccacaccacgtagcccaaaagtttaaaattactttctttccttttaaatccgataactttacatttgtcccatctaacttcgttaatgtaaagtccggtgcactcttccctatctcaataccattccttgcgataatctctttcatcgcagcttcacttttttcttgcttcacttttaccgcctgctctttataaccaaactgttcataagctgcatatcccgctaaacaaagtaacactacaataatcgtaagcttccgccacattttatatcaccctaacgtattatcttcttttaacacattcatcaaaatactatataccttattttagcttatacggacaagcttggaaatattcacattctaaataatcagaatttttataactaagatgaaatatttaccttttaatcatataattagaaatacatagaacattttacaatgaaaggagctctcatgaatttatttaaaaaaatacttctatatattcttagttttatattttccccaatcggaattatcacatggattatctcactatttagtaaagatcctgaaaaaaaacagttggacatatttgtctctatatcgcattaatctcatttatccttttggcaggcctcggcattattacttttttcacgatgactaccattactactatagaatagctatagaaaggatgattgttttgggagaacaccctatcaccaaagagctacgctatatacgaatatgcttagttattttagtaatcgttcttttatttttcaacagtgaaaaagtcgttgaaatttctacaaatcatgattccatagaaaatgttcccaccagtaatatgacacaaatcgcggaaaatacattcgctattcaagaatataatccattactaagtagcgaacatacaattaagattttcaaatataatccagatacaaatcaacttactctcgtcaaagaagttaattctagtgattcgaattcttatacttatcaacttaatgagaccgaataaagtgaaactttaatcagccctcaccaatcgggctgcccggcaaatagcggaataaagataagagcattacatatctcttatctttttgtttgcaactctttgtacaatgagttgcaatttaataattctctaggattcccacattccacaatagtcccattctttatgacaacaacacaatctgctatcatcgctctctctacatcatgtgttgccacaattctcgttacatctcttcctatcccttcaatcatattccaaaccagttcttgattgcccggatctaacccagccgtcggttcatctaaaataataagagttggatttgatacaatcgcgcgcaataatgcaagacgttttctttcgcctcccgaaaactcttcaccgcttttatgtagcacagtttgactcccttcaggtaaccctctaataatcggcgttgcatttataagttcactatttttttctaactgattttctaaaccctcttccccgaaatacatattctctgttaccgtcgttcggaaaaaacgtggttcttgccacactgtagtcatacgagcttcattaccataataagcaatgctaccgttagatggtttatacaagcccgttattaactttaaaagcgttgtttttcctgcaccgctttctcccacaatcataacgagttcaccaggacgaatttgcaaatcaatattatgaattctgcatttctcttcgtcattctcctgaaatgaaacatttgttatcctgatccccatcgctctttctacattgctatctgctgctcgtttatttaaaaagcaaaaagctctatttgccgaagcgactgcaacttgtgtcattattaataaatcgcccacataacggacagggaaaaagagcatctcaattgtcgctaacactgcaatgagtgaaccaacttctatttctcccctcattattttttgtgcacctataatgagaacaacaatatatgctcctgtttcaatcaccgttccaactactccaatgcaatgttgcatcatcgtcttctttacttctgatttatacgattgtgccgttacttctttaaataagcgaattgcccatttttctttttgtaaactccgcaaatcttgtatcccctttacaaactgtgacaccatctctacaacacttgagtgatttttttgagaaacgcttgcaatatctcttaccttttctcccatcagtattggaacaattgtacttaaaaataaaaacggagttacccacaatataaactgtatatctatatgttgtagtgctatgaaagctccaataaattgggcaatagcgtgtatatattctattaatatagagccatataatctgacccagttcggaatatcagacacgaccaaagtttctaactctccttgcttaatcttctcactctcttcaaacggtaatgagaaatagtgacgcaataattctatacgtttcgtttgtaatatacgttgactcgcttttgaacttatataatcaaataaaagattgttcgcccacattaaaaagtgactacccgcaaacaaagctatatatacatacgcaccttttagctccctttgaataagattgtctacaattaatcccatgaaaattgggcgggataaatttaaaatggcagcaattatcccactacatacagctgctattactaatattttttctttctgtaacggtaacaaaattcttttatattctttcatgacgtttcctccatttttcgtagtaaaaaagaaagggatgaaaccatatggtttcatccctttccataaaataaggaagctaactattgttagcttccttattattcatttcaattatttagttcgacactttagactcttcaattttctcacgaagaaccatttgcagaataccaccgtgacggtagtagtcaatttctacttcactatcgaaacgagctactacttcaaattgtttttcattgccatctgcatcagttgcaactactttcacaagatcgcgtggtctaactgttttgtcgatttgaatttcaaatgactcgttaccaacaagacctaacgtttcagcactttcgccatctttaaattgaagtggtagtacacccattaacactaagttactgcggtgaatacgctcaaagctttctgcaattactgctttaatacctagtaagtttgttcctttcgcagcccagtcacgagaacttcccataccgtaatctttaccagcaacaactagaagacctgtgccatcttctttatatttcatagcagcatcatagatagatgttacttcaccagttggccaatatgttgtatatccgccttctgttcctggtgcgatttggtttttaatacggatgttcgcgaatgtaccacgcatcataacttcatggttaccacgacgagaaccgtaagagttaaagtcaactggttgtacgccgttttctaataagtagcgtccagctggtgtatgcttaccgattgaacctgctggtgaaatgtggtctgtcgttacagagtcaccaaatttaccaactacgcgtaggcctgataatgtttcaacttcacctggctctttagataaaccttcaaagaatggtgggttttgaatgtatgttgaatcattatcccaagtatataaagcttcgtttgaagtttggatttcattccaacgctcattgctgttaaatacttgtgcatattctttcttgaacagttcagatgtaacaacactttgaactacatcttcaatttctttagctgatggccaaatatcgttgaagtaaacagcattgccatttgcatctttaccgatttcatcatttttcaggtcaatatcaacagtacctgcaagtgcatatgccacaactagtggtggtgatgctaagtagtttgcttttacaagtgggtggatacgcccttcaaagttacggttaccagataaaacagatgttactaataagtcgtttgctgcgattgcttcttctaattctggcgctaatggaccagagttaccgatacaagtcgtacaaccgtaaccaactgtttggaaacctaattgatctaaatatgttgttaaaccagacttatctaagtactcagtaacaactttagatcctggtgctaatgatgtttttacatactcaggtactacaagtcctttttcaattgctttcttcgcaactagacctgctccaattaatacgtatgggtttgatgtatttgtacagcttgtaattgcagcgattgcaattgcacctgttttcatcgttacttctttatcttctaatgtaaccttcacttctttatcgaactcttgctcattaaatccaagtccttgtgttccaactggtgctaaaacagctttgtggaacgcatctttcatatctgaaagtggaattaaatcttgtgggcgtttcggtccagaaaggttagattcgattgtatttaaatcaatttctacaagatcagtgtagattggatctttactgtctgctgtatagaataaaccgttcgctttacagtattcttcaacaacgcgaatttgttcttcatctctacctgttaaacgtaagtattctaatgaaatatcatcgattgggaagaatccacaagttgcgccgtattctggtgccatatttgaaattgttgcacggtcagctaaaggcatgctctttagtccattaccgaagaactcaacgaatttaccaactacacctttttgacgtaatacttgcgttacttttaaggcaacgtcagttgctgttgtaccacttggaagtgtacccgttaatttcacaccgattacttcaggtactgggaagtatgaaggctgtccaagcattcctgcttctgcttcaataccaccaacaccccatccaagaacgccgataccattaatcattgttgtatgtgagtctgttccaactaatgaatctgggtatgcaactaagtcaccttcagcatttttcacagcatgaacaactggtgctaaatattcaaggtttacttggtgtacaatacctgtagctggtggaactgcacgatagttatcaaatgatttttgtgcccagcttaaaaatttataacgttcttcattacgtttaaactctaagtccatgttgaatgcaagcgcgtctgccgtacccgctctatcaacctgtacagagtgatcaattacaaggtctacagtaatttctggattgattttatcaggatctccacccatgtctgccattgctttacgaagcgaagccaaatcaacaacagctggtacaccagtgaaatcttgtaaaattacacgagatggtttaaatggaacatcgatatcttgcacatctttcgttccccatttcgctaaatttgtaacatgctcttctgtaattacacgtccgtctacttgacgaagtactgattcaagtaaaactttcacggaatatggtaattgagatacgttgccaacccctgcattttcaagcgctttcaaatcataataatgatacgtttttccatctacttcaaaagttgcacgtgattgaaatggattatgtttgaccattatgtttcccccctgttaaacgtgactaagttgtctgaatataaaatgtagacaaacttttcaataccttacgataatatcttattacaactttctaaataagtaaataataagaaacttatagattatcataagttttctttatgtttctaaatttgaatagtgttcatgctccttatgaatactattaccataaagtaaagtgctctattagcgctttacttatagttcatacacactatgaactgctcatcattcaacatacaaaaaaatgttatagaggtgaaataaaatgggtaaaagaaaagcaaatcatactatttcaggaatgaatgcagcatccgcacaaggacaaggtactggttataacgaagagtttgcaaatgaaaacttaactcctgcagaaagacaaaataataagaaacgcaaaaagaaccagtaacgaaaaatcccaaaaggaacattcaccttttgggattttttctaatgtttataacgtaacaattctgaaaccgttacaaatcgatagccttgtttttttagctcaggtaaaattttggctagtgctgctaccgtttgactacgatcatttcctccatcatgtaacaatacaatatcgccacttttagcatttttcactacatgatttacgatagattccacccctggatttgcccaatcacgtgggtcttgatgccacgaccatagaacggtttgataacctgcttcttttgctgttttaaatacagcatcgttaatatatccaccaggaggacggaatagcaacggttctttcacccatttttcgaaaaatttctttccatccaaaatatctttttttaatttttcatctgatgaactatttgcatataaatgattcatcgtatgatttccaatctcatgtccctcttttaacacttgtttcactaaatatggattgcgctgaactcgaaatccaatcataaaaaatgtcgcttcagccttatattgacgtaataaatgtaaaacttgtggtgtatatgttggatctggtccatcatcaaatgtaatggcaataattttttcattattaggtacttcccacgttacatagccagttggttctagctcttttctgagcaacattttcgcttccactttttcaacttgaaatatatgtactgcgcataataaagaaaaaacgaatagaaaaattttctgttttcgcataatgttcattaaagtaaattaggttgtcaaatacacaacaacctaatttacttttctaattgatctacatttcgcattatattttggagattattttcatattgctcaagttgtggacgttgtgtttctgaagctacctctagtgcattttgaatttgttcatatgcttcctgaacctcttggcgtaattcttttaaatcatgaccgtagtttggatcatttttcacaatgttgttaaatgcattttctgcttgtgtaacgccttgctgcgctgcttgaaacgcttgttgtttatctttatgatatggcattatataatcccctttctgtaatagttagtcccaattatctttacctttttttctaaaaacattctcgtataaatttgcaaacttctctcattctaaaaaggaagaggaggtgtcacatacaatgggaaaaaacaatcgtgaagcgaaagaaaaaaaaggacaacctgaaccattaagcggatctcataaagtaaaaaaccgtaaccattcacgccaaaaacatcatgcgcatcatgatatgtaaaacaaaaagtgcacactagctatcttttccacatacaatgtttatatttttccatttattcttcacccctaattcattcatgcataacatagtatgaattgagattttacggagggtgtcttacatgggcaagaaaaagaaggattgtctttttcatgttgatggtttcgaagaatggatggatcagttttgttctgactcttgtagtaactttagtttcccaaatcaaattcatattgacctttgcgaaactgaacaagaatacattttggaaacagatgtaccaaatgccaatgaacaaaatgtagtcattaaaaagatggagacaggcctaaccatttgcatacttcataaaaacatttctttgcagcgaactatccctttacccgctaatgttatttataagaagatgctagcctgcttagagaatggttttttggccattcatatttccaaaaatgaagttgctgataaacatgaaaagaaagttcttttttcaaattaagagttaatataatacaaacataagccccagttggtactggggcttatgttatttcgcatgcatttctatattagaatttctatcatacctttttttcaataaaccttttgtaactaaaagcacaggaaatgccacagttgagaatgtagctaatgctgaaaatactgcaaacccattttggtacccgtagtaatcgagaagtactcctccaaaccacggacctattactgctccaattcccgaaaagcccatcgcaccgaagtatgttccttttagatgcgcaacagcaatatcatcaataaatacatccgtcatcgaaaacattaagacttctccaattgtaaaaataattgtacaaacggcagcacctagcatggattctactattccaaagccaaataatcccccactcacaaataaagcccccaccataattgatgttaacggtgtatactttttacaaatttgaataacagggtattgaattacgactacaacaatcgcatttaaagctagcatatatgaaaataatttcactccatcctgaaatatatgtgcatttgcaaaatattgagatactgttgtcgttaaatgtgaaaaaccacaattactcaaaataataccaactagtgcaactaaaaatacgacatcctttcgcaaaatacgaattgcctttaacattgtgacaggcttttctgtatttactttctttttttcaatcggatacttcttaaattggaacgctaatatagctgtatataaaatgtatactccagctgctactaaaaacggaattgttgattttgcgcttccaatctgtaacccgacaagtgggccaatcgctactccaacattgattgcaccgtaacgcaaattatatacgagtaaacgatactcaggtttcgttaaatctgataataacgctcttgatgttggctcaaaaaatgacctacataatccattcaaagcatttaataaaaagaaacttaaaacatgatctgcaagtgaaaaaccaatgaatacaaagacccaaacgatcatggaccatattataatcatatttcgaccgaatcgatctgataaattccctccgataaaactagcaaacactccaacaagtgcactcgttccgataatagcacctgtcattccagctgatacacctttcacagtcgttaaataaattgctaaaaaaggaatactcattgacgtggcaaacctcgcaaataaagtccctattataattgtcattcctaacggatgaatattttgcaacttccccttcatcttaaaaacctactctccctgttcttacataaaaaaagaaagcaaaggatctgctttcttttccctttttatacttgcgctgttgatacccgcgctgttctcgttatatccatatctatgccatatgtaaactgtaattctttacaaacatctttaattaatattgcaacattatacttctcattaaattgtaaaacgatgttctccacttcttcatatgtatacttatattcgcctgtaatgacactttttagatcaaagcattcgttaatacaaagttgtacaagtagctggtcatatttctctattacatcttctttcttccaaagtaactcttttacatataaccgatcaaacttcacactttctcgattacactccgttaaaatccgggtcatttcatttaattctcgatacaattcagaaatatttttgcttaaactaagcagtttatctacgccattttcatataacatatttattccacccccgcattttcttcttattatagcaagaaaattctaaaaatagtttctttcttctgaaatattaggaaactaatttcaattgctttacaatgaaactagttaatgcgagaggagaaagaaaattggagcacaaattatattacactgacgcttataagcaagactttactactaaaattataaagcaagattatgataaaaacggtaacttatacgttgttttgaatgaaacagcattttatccgacaggtggcggacaaccatatgatactggtacattaaatgatatcaatgtaatcaatgtagaagagataaacggagaaattcgtcactacatcgcagaacaattacatacagaagacgtagaaggtaaaattaattgggagcgccgttttgatcatatgcagcaacatgcggctcagcacattttatctgctgctttttgggaccattttaacatacctacgattggattccatcttggtaaagaaacggtaacaatcgatttagaaacagaaaatctgcatacagaaacagttgaaaaagcagtacaaattgcaaacaaaattgtttttgaaaaccatccaatccgtatagagtggatgaacttagaagaagcgaaaacattacctcttcgtaaagaaccgaatataacagaaaatatacgcgttgttattatcgaaaattacgactacaacggctgtggtggaacccatccgaaacgcactggtgaagttggtcttattcaagtactaggatgggagcgcaataaaggtggtatacgcttaacctttatcgctggttggcgtacacttaaattaatggggcaacagcaacaaattatgaaagatgtttccaaacaattaaacagtagcgaaactgatatcccagcaaaagtggcacagcttcttacctctcaaaaggaaaacgaaaaaacaacacaaacaatgaatgaaaaattattatttgcagaggcaaatgaattactgcaacagcccaccgaaatacatgctgggttacttatttctaaagcatttacagatcgttctatgcaagaaattgcaaaaatatcagctatcattacagaacaacaagagcatgcaattacgtatttcgttattgaaaatgatgacaaactacaatgtattctcgcttgcggaaaaacagtaacgctcgatatgaatgctcttttaaaagatgctcttcctacaattgaaggaaaaggtggcggaaataaaaagagtgcacgcggcggcggaaaagcggttatgaacggggacgagtttttaaatcagcttgtttcttctttacagtcagcagtgtaaaacatgtttatgaaggatagctaacggctatccttcaactatatttacaggcctatatgttgtttcaacccttgataacttcctgcatttgcaaaaccgccacttataagattgataaaagtttccgaaaaaccataataacttaattcgttaatcggtaccatttgcacatcatgaatcggattatgatcgaactcgttagaaggtagtgtaatttcaccttcaatcctttcaagcagaaacgtaatatgtaacaaagatggactagcatctggtttatcacaaacatagagtagcttcttaattttaacttctaatcctgtttcttctctcatttctcgaatcatcgcttcttctaacgtttcaccattctctacccttcctccaggtaaagaccaatcgcgattagccactttttgctttactagcaatactttttcatcttcaattaaaattcccgtaacacgaacttgcattatattttctatatataacctcctcttcccattatatttacacattaatccttccataaaaagaacgtatgttttataattaaagaaaattatggaagaaagtagttgttacattcatgcgaccatctttaacaaaaactatatctcttacagatttccaaaattattattggttaaaagcagaactgcaaacattttgtcgcgagcatggtctgccagctagtggctctaagatcgaaataaccgagcgtatctcacattatttaactacggggaaagtcttaaaaaacagctctgtgccaaaagtgagcaaagctcccctctcttataaagacctttctcttcaaacgattattactaaaaatcaccgctgtagcgaagatgttcgtgcttttttcaaagaaaaaatcgaaacaaacttccgctttacagtagctcttcaaaagttttttaaagagaatgttggaaaaacatatgaagacgcgataacattttggtatgaagaaaacgaacgaaaaaaagatcctacttataaaacaacgatcagcgcgcaatttgaatacaatcgctttactcgggactttttcaaagatccaaataataaaggaaaagcaaaagctgatgcgattgctgcttggaacgaaatgaaagcgaagcctggcagcaatgtttatgttcctcaaaaagtagaaaactagttacctcactagtcttctactttctcaaataatagcgcaatccctatcccgcctccaattcctaatgtagcaattccatatttcataaactctctttgagcctgataaaacaaacgtgttacaagcatagccccagatgcaccgtacggatgaccgagcgcaattgccccaccatttacatttaatttttcatacggaatttgtaactcttttgcgcaagcaacaacttttgaggcgaatgcttcatttatttcaaaataatcgatgtcctctacttttacattcatttcgtttaataatctgttcaccgcaaatatcggaccagtccctggaagattgggatccactcccactacagtactacgaacgaaacgaaggacaggtttataaccgaactttagggcttgtccctcttccattacaagaacagcacatgccccatcatttacaccacatgaattacctgccgtcactgttccattttgtaaaaatgcgggcttcgttcttttaatgattcgttcataattcatttctggctttatagattcatctaataatccattaaaagaaaatatttcatcatgtatatatcctttttctaacgcttgcagtgtccgcttataactaagacaagcgtactcgtcttgcatttctctcgttatgttataacgctccgcaacatattcagccgctactcccatgtcaggatcaccaattgtttcaggtgaaaatcttgctcttttttgaaaaggtgacgtacttgtactctctactcctccggcgatatagcaattacctgccccgccttgaatgagatgacacgcagttcgaattgcttctaaaccagcaccacattgccgatcaatcgttacaccaggaatatgatagccaagtcctgcctctaaagcagataatcttgcaacattccctcctggcccaacaacatttcctaatataacatcgtctatctctctcttaattcctttacttaaaaacgtaagaagcggcgttgctaattgctgaacttcatactcttttaatatcccatccttcttaccgataggtgttcttttcgcctctacaataactgccttattcatatgttttctcccggttttcaatcatactttttgcttccatacgagcgattttcccactatttgtataaggtattccatctacaaaatgccattctttcggtattttaaacgaggataatcgttgtaagcaaaaactctttaattgttgtttcgtagcacttccttttacgatcgcgacgggcttttcaccccagtaactatctttcacaccaattacaactatttcatcaacagctgggtgttcatgtaatacactttctatttcttctggataaatattgattcctccaaataaaatcatattcttctctctaccaacaatatatataaagccttcttcatcttcatagcctacatctcgcactgtcatccagccatctgcattcaactcccgtgttaaacccccatctattatgtatcccataaaaaactgatcacttttcacataaacagttcctatctcgcctttttgtacttcttcgcctgcttcattacatattcgaacttgcacattgtgacaaggttttcctactgaatttggccttctttcgctttctgcatcgactagtgctgttacaaaacttaactctgatgcaccataaaattcatatcttttcgcataaggaaatatattctttattttttctttcgcttcagcttcccatttcgctcctgatgaaataattttcattttattttctattaatctattttctttatataaagattcaagcattgtcggaactgtatacataaccgatatattttcagtttctaacttatctaatacttgattcggaatgaactttctcataatgtgcaccgtttgtcctacatataatgcacttattgccccgtataagaaaagagaatgaacgagcgtcccagctattaaaattgaatcctccattttcatatgaaagtcatgtacattacaatcaaaactatgaacccacgattgctgtgcacgtaaaaatgcttttgcttttccagttgatcctgatgtaaatcccatataaaagggagcatttcgtaaactttctacagtggaatgtgtaggaagatatttctctatcattcttttccactcatcaatttcaattactcttccttcttcatcaggtagatcatttaccttatatcgttctgtcacaatcatatccagattactgatctcaattctttctctgagctcatcttgtttccactttatatctaacggaacacaaacccacccggccatagcggcaccagcgaatagttgtaaaaactctatacgattttctaataggattgctattgttttattctttgattctgttgcgtgcaaccagtttgctactttacaaactgattcgaaccactctttatatgttaaaactctatcattttcctttatcgctattttatttggttgtaaagaggcatgctttttgtattcttttgtaatacccatatgagacgtcctttctttacaaaaataataaaaagaaacacggaattaacgtgtttcttccctttatcatcccgcatttgtatattttccattctttaaagcgggcgtaataatatgtttcaatgaacgatgtaattttgttacgagaatcgccgcgataattgcttttatacaatcccctggtaaaaacacagcactcactttcattgtctcccatacagaaacatccattaaaaacgcttgtacagtaataccaaatacataaactacgaaaataccaccaattatattaatacataatacttttataatagaaacttcacgtaaacgctcaattaaataaccaataacaaacgctccaatgatgtaaccaagtaaatatcctgcacttggcccaacaaatacaccaaggccaccgcgtccaccagcaagtaatggtgctccaactcctacaataagtaagaaaataagctgacttaatgcaccaaggcgtgaccctaacaatccacccgcaagcataacaccgagtgattgcaatgtaatcggaactggtgtaatagaaagagcaatcggaggtattaaccctaacactcccataatagaactaaataaagcgacgaaaactaatttttttgtatgcatattttcttctcctgtttgtaaacttaaaagtgtttttaggtaacatatcacgaaaattatattatctttccacccttcttttgtcaacttttatttaatttaagtttacaaataagaattcacttatttctctctatgcaaatgctccagttctttccgaagcgcctgtttcaaaaacttcccaacagatgttttcggtatttcttccataaatacaatatcatctggtaaccaccacttcgcaaactgtggttttaaaaactcatatatttcttcttttgtaaccgtactatttttcttttgaacgacgcaggcaattggtcgctcttgccactgagggtgaggaatcgcaacgacggccgcttcaaatatagcatcatgtgccattaaagcattttcaagatcgaccgaagaaatccattctcccccgcttttaataacatccttcgtacggtcaacaattttcacgcagccttcctcatcaaccgtaacgacatctcctgtatataaccaaccatcacgaaaaccttcgacagtacgattatcgttataatagctttcagcgatccatggcgctcgtaaacatagttctcccatctccgtaccatcccacttcacttcaccatttgtaccgactactttcatctctacaccagggacaagatacccttgttttgatctaatttctaattgctcttcatacgataattctgtttcataactttttaaacgtgcaagtgttacgagtgggctcgtttcagtcataccatatgcatgtatgaatggaacattatgtttctgttcaaatgctttaataacgcttttcggcgcagctgcacctccgcatagtattctcgtcatactagataaatcgtaactattattttctaactcttgtaatacgccgagccaaattgtcggcacacccgcagctaacgtcactttttctgattgaatcatctctaataaaattttcggggtaaacatcggtccaggaagaacttgttttgatccaaaccaagtagccgcaaaaggaagtccccaagcgttcacatgaaacatcgggacgattgccattgctgcgtcactttccgataaagcagctgtatcagctaaaccgagtgccatacaatgcaatacagtactacgatgcgtatatacaacaccttttgggtttcctgtagtcgctgacgtataacacataccagcaggtgtattttcatcaatatcttttacaaattggaaattgggatcgccttcttctaatagcttttcataatgatatacaggctccagcatagtatttggaagttcatctttatcagtcataataatgtaagcttgtacagttgataattgtgattgaatattttcaacgagcggtacgagatcttcatctataagtagaattcggtcttctgcgtgctgaataatgtatgaaatatgttgaggagataaacgaatattaatcgtgtgcaaaacagaagcaatacctggaatagcaaaatacgcttctacatgtcgatgatggttccacgctaatgttcctacaggttcaccttctttaattccaagctttttcaacgcactggaaagtcttctcgtcctttcccctaactgcttatatgttaacgttgtaactgtatcatgtgtccgtgaaacaatttctttcttcgaaaacagtttctctgctctttccatcatagaactaattgttagcggtacattcatcatcatattggttatatccccctttaaagcgttttcatttttcgtttattataacagacttccgtaaatggttacgacatttttctgttttttctgaattatttctttggaaataattcagaacgataaaaaacatgttttgaatacattgattcgaaacatgttttttatcttttataaactatctaccttttttcttactttctttttcagtttaaaaataaaacgattactgtattccttattttctactaaaattcgatatatctcccatactcctaacacacgaacaaaaagataaactccgatagcaataagtacaacacagtacggataatactgaactaattcccctgaagtgatatgctttttctcaaacaaaaacgggatcgcgcctgctgctataaaacaaaatccaacgatcattaccgcggcatacttcttcttaataatcacatatctttttgtcaattcttttagaaagttttgatcaaatagtagttcttcctttttcaatacattgtatcgactctcttctatcgttacaggtgccatcattgctccaattccaagaacagcaatgataatgacaagaaatgtcgacattgttgcattttctttaaataatagatacggtattgtagacaaaataagcaaactaaaccttaacgctatatattttgaaatcttttgtccgtacactatatacccttctgccatttcctgacttacgtaatagccatccacattttcattactttgctctgcagtttcttttaataaatagtcgagtgatacttcaaaaacatttccaatcattattaacttttcagtttcaggaaaaccttgaccgttttcccatttactaaccgcttgccttgttgtgtttaatttttcagctaatgcttcttgagaaaggcccttttcctttcttaatttaaaaagcttttcaccaaatcccatatgtgtgcccccctttgttttcttacctaaattgtatgtagacattgcccttatctctatcttcccggggttgcactttgtcaacttacggttgcgattgtgttatttagtggttttatagacgatttagctattttccttctatgattatggcgttaataaaccaagaccccttaacaaccaattataacaattaaaggtaattattgttatgaaaaataaaaaaactcctttattcatttaaaggagttttttatatgaaatatttcatttatccatatatctttctcgagatatacaatatcttttcgtgtcacgatacttacctttaatgaacatatccttttgaatcgtgcactcgtactccatattcaaacgtttcattaatttttcagatgcttcattttctgaatcacatcccgcttcaatactattaagatgcaactcatgaaaaccatagtagaaaaaagctaatgcagcctccgtagctaatcctcttccccaatattttcgagataaggcgtatgcaatttctgctgtatgtgtgaccaaatcatattttataaatccacacgtgcctataagtttcttctcctcttttaatacaattccaagaggtgctacttgccctccattatattgccccacaatttcttctatatagttatatgtgtcacataacgatcaatgagcatcccatacagtaaaagttgtcatctctttatctgtagcatactcatatatatgtaaactatcactcatattcattttccttaacataagtcgtttcgtatacaaagttggatatgaccacttctcaataatcataaaggtttctgtttaaacctttcataattccttacctttaataaaaggatattcccacaatctgtacaaatataagcatccaccggtgaagatgtgaacatcgtttcctttttccgtatttgtgcatatccaacaaactcaccttctcctatattttgagaaccacaattagagcatgtctgcacgtctttctgtttcatgagagcaccacctttaatctgtttctactcccttcgacagttcaattccatttcccttccaaaaaacttcttattctcctacattacaacaggaatctcaaaacaaaaatcgtatatatactatgaaatatatttattaacggaggaattttatgactactgttatgacactcgatatagcaacagaaattgaaaatgcagaaattgatatgctctcttctagattagagagactacaaacaataagcggaaaccccatgcaagtgcaaataaaaaaattcggtagcgccactgccttttcatcaaaaataattgctggtcctgcttttaatacggtaaaaggtattacaaatgcagatgcgattgatgcaatcatttcttattatgaatcactacaaatcccttgtcgttttgaaattaccccagcacaaggtacaactgaattatttcaatacttatctcaaaaagggttttatcaatctagcttccataccgctttgtatagtataccgagagagggttcatcacttcttccttctaatattacaatacgaaaactaaaagaaaatgagtttgatatttttgcagacatttatgtatgtggatttaatatgccatcctttacaaaagatagcgtgcgccaaaataatgaaattctttacaatgaaccaggatggcattttttcatagctgaagttcaaaatatccctgctggtattggtgtcctgtatataaataagggtgtcgcatcattagctgcttctgctactttgccagaatttcagcgtaaaggctgtcatactgcattaattcaaaaacgaattaagacagctattgaatccaattgtactttaatagttggacaagcaaggttcggtagcggcagtcaaaataacatggaacgtgcccacatgaaaattgcttatacaaaatcaatatggaccgcaagagacatattataatttactttatttctccttccgttacatttttaaacattttatgacaattccttttctatcctattaatcatttgaatattccaactagatttgttacgctattactaggtacatcattcaacttgcactatgaaaagagaattctaatcaaactacaaggaggagaaatgtatgactaagcatgaacacggtttaaaagaaaaagtagaaggtgccattgataaggtaaaaggcgaagtaaaagaagctgttgggaaagtaactgacaataagaaattacaagctgaaggaaaatgggataaggtgaaaggcactgctaaagatacagttggtaatgtgaaagaaaaagtacatgaatataaggaacataaataataaaaaacacgttggatgaattttcatctaacgtgttttttattttactttatatacataatgaaccaaatgacatatgatatatttttatttctctatgctctttgtaagcggttctttaaaggcatttctattccatacaacaaaaacaataagagaaataataaagaatgcaacaagacatatacccagataatcaaaattaactacttgtatgagattccaaaacgggccctgtaaattatagctttcaataagcaaagataatagttgatatccccctattaaaaaagccgtaataacagatattgaggtaattaatacattatatgaatttcttattcgactattttccattgcccacttataattcgtattcatgaatgtactatctaatgtatccatcaatgacattccggcagcaaacaaaacggggaaagcaaatatacttacaagtggaatagattgacttgttgcagttactgtagaaagagcaattaatccaatttcactcgctgtatcaaaaccaagtccaaataaaaaaccgattatatacaattgcttctgactatcaataaacgtaaataagcgctgtgtgaaacgatatataaaccctaaattttctggctgtttgtcctcgtggcttctcaacactttaataaggtacaacagattggtaagaccaataatgataaggaatgtactagaaacgattgtaccgataataccgcctatagttgaaaagctctccattccatgttttgccgtttttccaattaaagcaattaatacaatcatcgcaaatactaccgtagagtgtcctaatgagaagtaaaatcccaccccctgtgagtttttacctttttcaattaatttccgaacagtattatcaattgcgacaatatgatcactatcaaacgcatgacgcaaccctaaagaatatgcaataatagccattccgattatgctattacctttatatagcgccggtaataataataaaattccaagcacatgaagaaatataataataacaaaaaagttggttgcctttttcagttcacttttccacatagttactaaccctttctactttaaattgaatactcttgaaaaagaaaagtgccataataaaaactaaaatcgttataatagtcgctaaaataattacaaaattatttaacacgtcggtatgatttgtaagtgttaacagagctggtactgttgcagtaatccaagattcaatgaagcaaacaatacctacataaatatgaatcttctttttcaatccatcttgtaggaaaaataaaaaccaaaggaatgcccaaaagaaccaaattattgtactttgcaaactaccactctcatgtaattgattcacaattcccataaccgttgcaatgatagcaacccaaagagaatagtaacctacacctgaagaatcaagttttaatatattcgtaagaccaacatataaataagtaaaaccaaataaaaaaatagttccattagataggatagtccactcatcggattgacttcctgtaaataataaatataatggtgtcaaagtttgtaatgcccctacaaataaattaaagtatcctacacttttgctatcaataagtttaaaagctgctagtgaattcataaatagaactgcaccgacaaacaataatcccacattagtcatagtatccccttctcctacttaatattttcgataggatgttaattcttcatgtagacaattctctctaacaaaacgatgacactgaaaaaatatagactccatatcctcagtattatgactaagtatgcgaatgacaaagcctttacatggtgtagaagatattccaattttcatattgttagtgttagaaagtgatgttttcaatgttgcaattaaatcatttgtaatgttctcattaataactatgaaagtaccataatgggaatattgatttaatattcccatttgatctaacgactctttgaaagggtttagcaataaatgatcgtatactacaagtttattttccatatatatttttgttaacgaatcaaaatattggtatgtgaacttctccatatttggcgaccaaccaggcgtaactgaatcgcataaaatcaatgtagaattattttgcatatatatatttgttttttgcttatatgctgcatccttgtacataattaacgggtctggtaaatactccataacagcattctcaccaatataaaaattcaattcttgcaaagcataactatttggagtcttgtaaactttcgttgctgattggcttgttatatatgttttcgcatctttaccaacatttatatttatagaatagaaatctccttttaaatagcctccaccagaattcataatatagtaatatgctctaccatactcatccaaatatattggctgcgttacttttaaggcatctttatgataaaccttaataggtacggttttatgtctcttttccatcatatcaatgtttaagacacctgtaggggatttcattttttcagtccttctaacataatgttctgtctcatccaatttattaattcttgtaaaccttcctcatccttcaaatttgtaaaaaagtatggtttattatgtcggtaatttttcgtatcctgctccataactccaagattagctcctacataaggtgccaaatccgttttattaattacaaatacatcagatttgatcattccttgtccacctttacgcggaatcttttctccctgtgccacatcaataatataaattgaaaaatccactagctccggactaaatgtggcagctaaattatcacccccgctttcaataaaaataatatctaaattattatgtctaatcatgagttcttcaattgcttcaaaattcatagaagcgtcctctcgaattgctgtatgcgggcacccccctgtctctacaccaataattctatcttctgataaaacacctgttttcaataaaatctttgcatcttctttcgtataaatatcgtttgtaattgctgcaatttcataatctgtatttagatgttttgttaacttttcaactaacatggttttcccagcacctaccggaccaccgataccaattttaataggctttatcattttattcttcctccctatgacatgaagacccttacatttacatcttcatgttgcatttgatttatttcgaattcaggatcattcaatccaaaatcttctaatgaaagtatttgaattctatcaatagattcgcagattaattcatggcattcttgtaatagtttttgaccatctgtttgtccaagaggaatggctctcacaccgttttgaattatacttccaacacttgagtataagaaaactaagagcgtttcttctattgtcattttcaattccgcccctaatattccgtatacaatactcggatgaccttgtaatttattacccataatattttctttatatatatttaaatttacaaacgagaacaattcacacaataatttagaagtacttttactaatcattctatttgcttttctacattcaaaaggcaatgtttgtgctgttattaaatcatctaaaaatgtaatttgttctccctcattattcttaatggcttcgtaagtatatttgcaaattaagccgtccgtgtatgttaattggacttttacatatcgattaacccatttgaaaaacccgtctttatttgtaacttgtccctcttgaataaatgtttctaatccaaaagagtgactaaaacttcctgttgggaagttcgaatcactaatttggagtaggttaagtaggttaaatatgtttgtgcgaagcatgcttgaacggttttggtaatactctattttctttttgataaggaacaccttcctttttaagtaaatcttctactaagtagtcgttcgccaaaatcatgcacccttcatcgaattgtgctggtaaatgtctattccctaagttatgagcaataatccccatttcttttattgattttggagtaattacaattacctcttctggtaatacttcaatatacacaattcgattttcatcttcatataaaatatcaccgttctttaatgtttctccactatctaaagacaccccaatttcaaaaccagattctgaatataatttctgaactctcttcagtaaaagctcactagaaattaatatcttatcaagatgcttttttgtgtttgagaaatcattcatattgcatacgttgttattaattttttcaataatcattttatctcccccgttatatcaaaataaaaaatatctttgagccataggtagtacatctactgcttcacacgtgattacttgtccatcaactttaacttcatatgtctgcggatctacttcaatttctggtgttgcattatttaacttcatatcttgcttcgaaatctctctcgtatttttaacaggtaatacaactttatttaaacccaatttttctttaatattattctcataagctactttcgatacaaatgtaatcgaacttgactgtactgcttttccatatgcaccaaacatctttttttcataatatggttgtggggtaggaattgaagcattctcgtctcccattaatgccatcactaccattccgcttttcaaaaccatatctggcttaacaccgaaaaattgtggatcccatattacaaggtctgcatactttcctatttcaatagagcccacgtattctgaaatcccatgtgtaatagctggattaattgtatacttagctatataacgttgaattctattattatcgttatattctttatctccctctaaactaccaatctgctttttcattttatcggcggtttgccaattgcgaataataacctctccaacccttcccatcgcctgtgagtcagagctaatcatgctgaaaacccctaaatcttgcaaaatatcctctgccgcgattgtttcttttcgaatccttgaatctgcaaacattacatcttctggaatattcgcttttaaatgatgacataccatgagcatatctaaatgttcatccagcgtattcactgtatatggcaaggtcgggttcgttgatgatggtaaaatattattcagcgcagcaatctttataatatctggtgcatgcccacctccagctccttcagtgtggtacgtatgaataacacgattatcaatagcttttatcgtttcttccacaaaaccacattcgtttaacgtatccgtatgaatagcgacttgaatatcatatttatcagcaatctgtaacgagtgattaattgctgacgaagttgctccccaatcttcatggattttcaatccgatagcccctgcaaatatttgttcttccagggcaggtaaacttgaactatttcctttccctaaaaatccaagatttataggaaaagcttctgctgcttctagcatttttcttaaattccaagatccaggtgttattgtagttgccttagtcccttctgccggtcctgttcccccaccaattaaagttgttatacctgaagccaatgccgtatcaatttgttgtggggatatgaaatgcacatgtgtatcaatacctccagctgtaacgattttccgctcaccagaaattacttccgttgatgttccaatgatgatatcaatattatccataactgaaggattaccactcttaccaattgctgaaatcttcccatcttttataccaatatccgctttatatactcccgtataatcaataataattgcattcgtaataacaacatccacaaccccctgttctcttgtaagttgtgaattttgtcccataccatccctaattgattttcctccaccaaagacagcttcatcaccatatacagtggcatttcgatcaacatgtgcgaataattgtgtatccgctaaacgaatagaatctcctgtagttggaccatataaatcagcatattgtttacgtgacatcttaaaactcatgctatctccctctttttgtgtaagattgaatatcgccatccactttatttttaaatccatatacttcttgttcccctgaatatggaactagttcaatcgttttttcatctccaggctcaaatcttaccgctgtacctgctggaatatttaaatgttgtccaattgctacactgcgattgaattttaatgcctcattcacttcataaaagtggtaatgagatccaatttgaatgggtctatctccctgatttattactttgactttcattgcttttttatttccattacacactatgtcttctttcgcaaggatatattgccctggaatcataacattcacttcctttaatgaattggctgatgaatagttactaattttgttccatcaggaaaagttgcctcaacttgaatatctgatatcatgtctgcaataccatccataacatcttcagcacttaaaatgttttttccaagttccattaattccgctacatttttaccatctcttgctccttccaaaatttcatacgtaataatagcgatactttctggatagtttaacttaagccccctctcctttcgtcgataagctaaatcagccgcaacaactactagcagtttatcaatttctcttggcgttaatctcattacaatcttcctttctgaagtattttaaaactaagaatattctaaaaataaaaggtgtattttcaatgtcttttccgtgttttccctatgtttttttgctatcaatcaaataaaaaaagagccgatgggctctttttttattttccttcattcttctctaacacgtataaatcttcttcgatattcgttaatttctcacttacaagctttcttgcatctccaattgcttgattgtatgcaaatggtccaactaatttaaccatttcttctattaaacgctctgcttggaaacgtccaatttcatctaaatcttcttcaacgaaaaattgctgaatttgcgctacaagctcttcttttttatcatttggtatttttatattcatcatcgttgttactcctctatatttaagataatatcttccttaactctaccatagaaaaacgattaccaggacagctttttgtaactccttctaactctctatgacctagtatattttctttctttatagcaaattgcttcataaacattttgcataaagaatataatgcattcacttgtgcaggagttggatcgtatttatcgaaatttcccgtcatacatattccaattgtatgacggttatggtctttcgcgtgcgctccaatatgtaaacctcgcccttccactacagttccgtccttttcgataaaatagttgtaaccaatcccgctccaccctcttacagtttgatgaaattcatgcgttttatacacgtcccatccatcttcagctgtatggtggataatcagttgatttactttttctaaaggaactaattcatcttgaaatgttagattgacatatttaatttccatttgaactgcctcctcttaaaaatcaatcataataatcgttttatcatctggttttattctcttttccccttccagcttttcaatgattgctacatattcgtttatactattctttcttatatatgcaacagtttgttctaatgaccaatctgggtggaataacccgtctgaacaaataaaaattccactcacttcatctatatgtaattcaccatgttgtaaataatgtatcgcttctttcattccatttgcaactgaataaccatttggcatatttgcaagataacgattgtattttaactgttctcgcacatcttgaaaaacatattcttctggtacagataacccttttttacgatcttcttccctcttcctttttgctcgtttactaattccttcaactgtgtctttcgttaatacttgcatcgttccattttgaaaagttgcgacaatcatacagtccccaagctgcgcatattcaattttctcaccaactatttgaactgccgcgatacatgtgcaccacaaatgctctttttttctcgtgtctacttcatattctaacattttgctttgtaatgcttcatttgctttggtaactgcaaattgtaaactatgattctctcgtaatgcagtaaaataatttgcaaataaatgcgaagcgatgtatgctccattatgtccattttcatcacgaaacgggacaagtggtgttgcaccgtcacatacaccataaatctttttatctttattacaaaaataagaatcctcacattcttgcttcaacgggcttttctgttgatatgtttttatcttcacaactgtatcccctttcaaatgataaaatactcaaattctttcgattaatctaatttaccaaaataaactgtttttacccaaaactttcaatatcatatataatcttgaaataatatgaatttttcagtgaaggacgggaaagaaatggtcagattccttggtgttattatcggttctattattattgcggttgcctttaatcttttccttatcccccacaaaattttaagtagtggaattggcggaattgctattattttagggattgtaacccctgtaaacacaggcattattaactttgtattaaacttacctatccttattttagggtacataggccttggaaaaaaagtgatttttaacacagttgtctctgtagttgtattatctgttgcattatactacgttccagtaaaagtcgtagcaacagatccattgttatcttctatcttcgggggtgtcatcgccggagctggtattggtcttgtttttaactgtaatggatccactggtggatttgatattatcggtatgcttttatcccgcaagcgagacattaaacttggcggattccttattattttaaatgcagtcgttgtaataatcgcaggattcttcttcacctgggatgttgcacttacaagcttactttcaatttatgtaactggtaaagtaattgatgctgttcatacaaaacatcgtaaagttacacttatgattgtaacaaatgaagcagaaaaaatgaaaaaacagcttctttcaactgttgtacgtggaataacgttacttgatggcgaaggcgcttattcaagcgagaaaaagcgtgtacttatgacggtcgtttctcgtgaagaattagcaagtatgaaacttacaatttctgaaattgacccgaatgcattcgttaatattacagaaactgtagaagtgttaggacttttcagaagaagttaaagactaggtgggaatacacctagtctttattttgcataaattcaattctgtttccaaacgggtctgatacgtaaaatcgaattacatctggccgtgcataatcatcaatcacttttacacctttctctataagtgtttgcttaaattcattaacttcattcacataaaaagctggatgagcctttttagctggtgtaaagttccgctcgacaccaatatggatttcttgatttccacatttaaaccaacatccacctcgttttttcaactcttctggctttggaatttctaccataccaattttattcccataaaaatcacgcgcctcttcttcacactctacaggtgcagctacttgcacgtgatcaatcccttgaatataatttttcattttctctccccctcctctaccctaatgttatacggaaaacagccgtctgtaacttacaaaagggttataaaacaatataagctccccttattaccatcctgcattcactttgcaaaaaaaataaaaaaataaaatttattctataacttccattttttatagaaatacacatcacatctatattatagttatgaatagacaaatctttttagatgctatttgtacggaggaactattatgagtcgtaaaaaatattcaccaactcaaaaaaaacgtcatccgaacatttctagacgtttgcgaaaccatatacaagatcgttcattaacagaaatgtacgcatctctgttcgaacataatcctgatagtattatttcattaaacttagaaggagttattctacatataaatccttctgccgaaagaatattaggttacacttctttagaattagaacagaaaaatattacctctattttaggagcccatatttctgagcaagtattacaaaatataaagaatactgaagcggataatcaacaagagtatatcttatctatttatcataaaaatggattcttattagatgttgtgacaaaactagttcctatttttgttcaaaatcgtcttactggtgtatacgctattatgaagccacttgaaaaatcagaaagaattgagaatatgctaaaagaaagtaagaagagattacgtacattagtaaactccatgcctgcgtttgttatatttaaagatcatgaagggcgctggcttgaggcaaatgactacgcactttcttgcttcaacttccatcatgtaccttaccacgggaaaaaagatagcgaactcattcaatataatgaagcataccgagaagcttttttacattgtgaagaagtcgatgaactagcatggcaacaaagacaaattcttcatggcgaggaatttattatacatagagatgatttcgatttaatcttaagtatatcaaaagttccgctttatcatcctaatggttctcgcaaaggtcttatcgtgatggggagagatgttacagagctaaaagaaactgaaaagttactacgaaaatctgagaagctcgcagtagtcggacaactgacagctggaattgcccatgaaattcgaaatccactcacttccctaaagggttttctaacattgctcctccctgaaataaatgaggagcaaaaatggtatatcgatgttatgttaagtgagatttcacaaatggaatccatcacgagtcaatttatggcgatgtctaagccacaagtattatctatccaaacttgtaacatacaaactttaattgaagaggtagttacatttattttaccgactgcaattatgcatagcgttcatatcatcatggatcattttgattacgtatatgatattcaatgtgacggtaaccaattaaaacaagtttttataaacatattaaaaaatgcgatagaagcgatgccaaatggcggaaatattttcatccaaacaaaaccattagaggataatttcatcttaatacgaattatcgatgaaggttgtggcattccagaagatcgtatctcccgtctaggcgaacctttttatagtttaaaagaaaaaggcacaggactaggattaatgatgtgttacaaaataattgaagaacatcatggtaaattacacatttcaagcgaattaaataaaggtacaattgttgatattgagctaccactttcttcatctcatcttgcaatccagtcctaaataaaaaagaagcatctgctaatggttagcagatgcttcttttttaaaatactttgtcataccactcttttgctttttctacttcacccatcgttaattgatgccctcgattttcccaatgcattgttacattcgcgtttgcattttctaatagtatcttcaattcctctgactctgctgatgaacaaattgggtcatttgtcccagcagcaataaacacagatttccctgctaaatttgctaattgcattcctcttcttggtaccattgggtgatgaagcacagcacctttcaatgcattttcgtaatggaataataagcttgctgcgatatttgccccattcgaataaccgatagctacaatgttatttctatcgaatttatattctttagccgcttcatctaaaaattcatttaattccttcgtacggaaaattaaatcctcttcatcaaaaatgccctctgctaatcggcggaagaaacgcggcatcccattctctaacacatttcccctaacgcttaataccgacgcttccggatcaactatttctgcaagtggtagtaaatctaattcattaccacctgtgccatgaagtaataacaacactggttttgacgtatcttttcctttttgaaaaacatgtttcatcataatccttttcccccttcaatcactttaatctaaatttctcacttcaaatggtaaaagcgtttgttcaatctgttttctatgttgttcatattgttccggtaactttaattcctcacccatcgtctctaacgattcatcatgagcgaaaccaggaggatctgttgcaatttcaaataagatttcaccatgttctctaaaataaatcgcgttaaaataatttcgatcttgtacaggagttacgtgatatccaaaacgcgacacatgctctttccagtctagctgatcagcatcgtcactcgctctccaggcaatatgatgaactgtgccaacgcccatttggccacgaccgattgttgataatttcaaatcaataatatttccaatgtcagcagaagaacggaatcgaacaaattcaccctcttctccaattttctcaagacccataatatgttctaacaattcagctgttttttgaggctgtgtagataaaagaacagcacctccaaaccctttaattgctacttctggtgtaacttctccaaaactccaattatttaattcgcctttttctctttcaactaattctatatgcaaaccatgcggatcatcaaattctaaatactgctctccaaaacgagtcatttttgtatacgaaacatcgaatttttctaatctattttcccaaaactccattgcaccttttggtacaacgtaagacgtaattcctacttgaccatctccaataataccttgacgagcacctgcccatgggaaaaacgtaataattgttccaggctttcctccttcatttccaaaataaagatggtacgtacctggatcatcaaaattcactgtttgtttcactaaacgtaaccccaatacaccagcataaaagtctacattttcttgtggatgccctacaatcgctgtaatatgatggattcccattgttttcttttccatttcttccactcctcgtatagtatgtttaaacttaatttttttactttcatgagagacctgtaaaataactcttggacgtctcaagatatttggcacgcccttttttagaaaaacaccccctatttatataaaaaactccccttgacttctcatagttggtctttcaaagtaaaaaaacacacccatccctaggaaagggacgaatgtgttttcgtggttccacccttgttccaatctagacgtatttcctcctagattgctcaagttcagataacggctgataccgccaataattactagattactcgttcactattgaagttcaaaggtggtaaaatcatttctcgtgttaggaagctcacacccttggcttccctctctgtaaaccgtaaaaatgatttcgtgtccttatcgttactttttcgttcatgtttatttgttaactcattatactcgcataaaaaacaaaatcaatactattttttaattattttaaattttcaatctcttataccataaaaaacacactcatccctaggaaagggacgaatgtgttttcgtggttccacccttgttccaatctagacgtatctccttctagattgctcaagttcagataacggctgataccgccaataattactagattactcgttcactattgaagttcaaaggtggtaaaatcatttctcgtgttaggaagctcacacccttggcttccctctctgtaaaccgtaaaaatgatttcgtgtccttatcattactttttcgttcatgtctatttgttaacttattatagttatcaaatttttaaaaagcaagcctatttttactaactattttcaaaatgattttttattatatttcacaatagcattatgcaactgccactcaatttacctattttgtcatttctccagttaataaatcaacggttcatatataaagtgaaggctaataatcagtggggattttgttcatccccactgattattagccttcaccaatcgggcttttacgggcagttgatccccacctaacttctttgctttcgctgaattttgaggtaggggtgttactgcccgttaatgcgggataaatccccattctaaaacccgtacatactcaccttacaaaattatatcaataaaatttttaatacaatctttttgtataactttcttctaaagaacgtgcaacatcttcttctgaagcattcactttcgcatgctctaacaacatttttgctgctgaaggtaactcttttttatttaaccaagattctggatcccatatcttcgaacgaataaacgcttttgcacaatgaatgtaacactcttctatttcaacaacaattccaagcaacggattacgtccattcgcctgcatttctttcaaaatttcttcatagtttgtaatatacgctcggccatttattctaagtgtctccccaagacctggaataaaaaagagtagtcctacacgtggatttgaaataatattcaaaatggagtctatacgacgatttcctggcctttctggaatgataattttattattattgagtacgtatacaaatccaggtgcgtctcctctcggcgaggcgtcacactcccccaacttatttgcagtagataatactagaaaaggagatttagaaaggaaatctacacaatggtggtctaatgatgaaataacttttttcaatgctcgctcacttggtttccccaatattttccgtaactcttcctctgttgaaataatcgattttatttccatacgctctatctccacttataatcgcccctttttctttattttcccaaaattcaatacgaatattgtataataaaatttgcagaaaggggaattaaaatgacagagtggttaacaatatttgattctgaaagaaatacacttgggaagaaattacgcgatgaagtgcatcgtgacggtgattggcacgaaacatttcattgttggtttgtagaaaaagatgctaaagatatattcttatatttccaattacgctctaaaaataaaaaagaagctccacttatatgggatattacttcagctggacatattatgcatgatgaagatgtacaaattggtggtcttcgtgaaatcgaagaagaattggggctttcctttcaaactactgatttagtatacaaaggaatctttaaaatagattatgaaatttcaaatcttactgatcgtgaattttgtcatatgtattttcacaatgtcatcaatccacttccattcgcaccaggtgaagaagtagacgatgtgatgaaagtacatgcaacttcttttctacaactattaaatggtgaaatttcatcttttacagctagttctgttttaaacaataaaccaattacaataacatttgaagatatttatccgtatgatcttgcatactatgaatttgttatagagaaaggaaaagaattattaaaaaataatagtttataaataaaataggactcttagcataatattgcgtagagtcctattttttattattgttcaagtatctttaatttattctctacttgtataaataaaagaataattaataacagcataaccaccataatcgctattattgtatgtggatatctaaacagtatactaataacacttccaattaacatcatgatgaatccgttttgcttcatcacttctgcactatacctgttacccgcatcccataattccttatttttcatagatcgtttcgtacgataaccatatgccgcattaatatcggtcggtggatttttttgaagaacaattgccgcaagtataaatatagtacctattaaaatactcattcctatgtttattagtgcatacatcaattatatcccctcctaacttacaccttcattatacgacatgacccttttttcaaatttataacacattcaatttctttcttttgatgtgtggaacatacttggaagtgttacaaaacgtgcccctttcgtttttaactgcggaatgattttgtctagtgcatctacagatccttgtaaatgcccacctggtgttgaatgctgaaggatgacacttcctggaaatgaattccctaatacattatttgtaatcgtatcagcgcttacacctttccaatcaactgtatcaacactccactgtacaatcataaaattttgctctgttgcccacttcaattgctcttcaagtatttcaccgtatggcggacgtataaacttcggtgcataaccagctaaacgatttaatatttcttccgtttttattatttgattacgatactcagcatcatttactttcgctaagttcggatgactatacgtatgattaccaattacatgcccttcatttgcaatacgctttactacgttcggaaatttttctgcgttttcaccaagtaagaaaaaagtagcttttacattatgttgttttaacttatctaatatttttggcgtgaattctaaatctggtccatcatcaaatgtaagagcgacttccgctttattatacggtcctgaaaatgcgtacgcatatttttcgacccacgaaaatggtgtccacgatccacgctcatatgctttcatttgtacttcatagttttgagggatatatgcgtatggcaatgaacttatatagtctccataataaaatgagttatatggcatataagcatacgaaacatctcgttctagtccccattgatatggagcaaacatttgtggcgaataaaaataatacatgataaaaaaacctccctaatttttcatatgtgattcctctgcactttgttagagaaattgttattcataaacaaaaaataagactgtccttaattaggacagtcttgctgctttatattattaatacatcgatgtactatctttcggcaaagctttcacatgttttaaatagttcgtcactttatcatcctcatcttgcggatattgatattcatatgtgttagcgatttcgttcgccacttccctaaataaatcacccatgacaaagaatgactcccatatgttttcatattctgcattagaaaatgtccttttaaattgctcccacatatcttcttcaatatattgctcgaaatgctttccaaacttccctgtattaactgtaaagtctgttttcataccaatatgccattctagcattacgatgaacatatctcgcactggtccttcaagcattccttttgcataagaaagctcttctctccatagcccttttgccacattcgtactacaccaccaaaattcattacagcaatccaaaaactctttttctgtaggcttttttattaagtaatctttatcgcttgctggcgggaatccttccatacaattatctttatcaagaagcagtttacttaaactatcttgtccaacgaacttttttattaactcaactggaactagcgttaaatcaatccgattcccatccatgaactgcattaaatatggaaacttcccatcttcatctggttgaactaacgacatttcttctggcatttgtactatcattatttctccaaatctatgaacccaattatgattagacgtaaaagattgtatatcatttacaacatacataatatcatagtcttgaaaacaatctcttttcacatttggatttacacgcgatccattcatgataactgctcgaattctttcatcctcttttgctatatttataattacgtctaacatttctttttcagttctcatctacttatatcctccaattttttaatatataatatagtgttatgtatattggaggtccacgagctaatctcgttatacacgatacatgttataatttttgaaacttctttttcatccctttttcctccttacatcactcttttacaactgccatccctttcaatttcccaatgctttctaccattcacttttaattataccgaaaattctgtctcgaatacaaaaaataaagaagggacatctaccccttacagaatagatatcccttcttttaaagttaaatttaattcctatggattagtagaccaaagcccagcagatttaataaatgtacgtttatttaatttcagctgcgctacgataaattctgcaatatcttctgcttgcattactttatcagggtttccatcagttaatcctaaatctacagccatatcagttgctactgtacttggagttaaagctgttacacgaatgttatgtttgcgaacttccatcgctaacgattctgttaagccaaggacaccaaatttagaagcactatatgcacttgttacaggtgcacctttttgtcctgctgtagatgaaatgttaatgatatcaccagattgttgttcaatcatgctcggtaaagctgcacgagttgcatagtatacacccattaagtttacttgaatgattttttcccaatcagcaacgtctagttctaaaaacttaccgaatttagaaataccagcgttattaattaaaatatcgatagatcctaaaccattttttaacgtttcaatcgcagttgttacttcttcgcatgaagaaacatcagcagttgcgataacagcttttacaccttctgcttctacttcttttgctacagcttttaagttttcttctgaacgagctaataagcctacatttacgccttctttcgctaatgcgattgctacagcgcgaccaatccctctacctgctcctgtaattaaagcatttttaccttgtaataattctgccaagtataacactccttaatcatctcagttatgtattatattaaaattgtatctatgtttatgtaaaaaggcaatgatgcactttcatgtgcgtaggttacttgtaggtaactatagaaagtttttatttataagtttcatttttttaccattattcatgtaaaataaaaacaaatccagcataggggagtgtatgagtatgaaaagcgaaggaaaagcttttcaatataattgcagtaacagtaaatgcatttttaaagagaaatagtgttagaaggttctccttctaacactatttctcttcatgattcggcatacgcacaataaattcagtaccttttccttcctcactctccacttttatctctccttgatgaaggtcaagtactttctttacaatagctaaacctaagccacttcctccataggcacgatttcgtgaagaatccgctttataaaaacgctcaaaaatatgttgtttctgttcttctgatataccaattcctgaatcacggatacgcacttccactactgtctcatgttcctttaactgaatagtaatcgtaccaccgcttggagtaaatttaatactattatgaattaaattaatccacacttgactcatactttcttggtcagcaataacatatactttttctaaatctagttctaactcaatttctttttcagcccagagtggttcactatttaacacaatttgctttaattgttgatctaatcgatagctcactctttctggtgtatactcttctgattctaaaagagttagctttagtaaattttgacttagtttagataatctcgttgtttcagtttcaataatggtaagataatgctttcttttttcctcagaaagattatcgtcttgtagtgctctagcaaatccttttatagaagttaacggtgactgtatttcatgagaaacattcgatacaaactcttgtctcattttctccatcgtattcagttcatctgtcatatcatttatactttttacgagcacgccaatttcaccatcatacttttcttcatttcttatttttacggagaagtctccttttgcaattttttgtatcggttcaataatagtccaaatcatcgcctctcgttttggtctcattaatattccaatcaatgtccaaataagaataataaagacaaaaccgaccatatcactaattagaaaagcaacaaacggcgatacgtttacgtcaaaagcattcaatatactagttgctacataaaatgcgatagaccaaattatagtaagaaaagaaaagagcgctaataccgctccaaatactttcagcatcttcaacttactcattcgttttctttttctcatttacttacctctaagcgataccctaatcctcttattgttttaatactaaatttcgactgctcttcttgaaacttctcacgtaaccgattaatatgaacgtctagtgtacgttcattcccttcaaaatcatatccccatatttcttcaattaattgctctctcgaacaagttcttcccgatttagaccctaaagtaaagagcagctcaaattcttttaacggtaatgtaaccgtttgttctccagatgtaacttcgaatgttttacgatttaataatacatttccaacttgaatcgattgggaaactgtaatttggtaacgtttcaataatgcctttactctcactactaattctatagggtcaaatggttttacaagataatcatctgtcccaaggtgaaatccttttactttttgtgatgtttcccctttggcagttagcatcagaaccgggatatcatagtattttcttaattcaaaacatacatcaaatccatccatatttggcatcatgatatcaagaataaccatatcgacttttacgtcatccattttctgaagtgcatctactccatcaattgcctcatatgtttgaaaaccttctcgttctaaaaatacagaaacgagttctctaatgtgtggatcgtcatctactattaaaattttaggtatcaaaggaaccatttcctttctacttagcatctaatatattgtttaaaaatgaatcatcagtggagtaaaatcccactgatgattcattttataatgcaccctctttaattttcaattgctgcgttgcaaactcacgatacatatcatgcgtctgtaataattcatcatgcgtaccactacctgtaagattccctttttcaataaagacaattttatctgcatctacaacagtagaaagtctatgcgcaatcactaacgttgttctgcctttcattaagttatttaacgctttttgaacgacagactcagatttactatctaagcttgaagtcgcctcatctagcataagaatttgcggatttcgaagtaacgctcgggcaatggcaattcgctgtctttgtcccccagaaagcttcacaccgcgttctccaacttctgttgcataaccgtttggtaagtcatgaataaatgcatcaacatatgccattgctgctactttttcaatttcttcatccgttacttcgccctcgacgccataacaaatattatcacgaattgttccatcaattaacggactatcttgtgatacgtaaccgatttgacgtcgccatgactgtaatgaataactcgtaattgattcttcccctaatttaatggcgccactagttggctcataaaaacgttccaataatgagaataaagttgttttcccactaccacttggtcctacaatcgctgtcacttttccagattcaattgtgaaatcaatatttttcaaaacttgctcttcttcgttatactcaaaatgtacattttcaagaacgatcggttgcttagcatttgtcactttcacaccagtttcatgatcttctacttcatattctaaaatcgtactaattctttccgttgcaccaattgccttttggaattgtgtaaagaacatagataattgactcattggcattacaatttgaactaaatacaaaataaacgctacaagttcaccggttgttaatgcaccgctagaaactcgcatcccgccataccctacgataataacaagtagtgccattaaaacaaacgacataactggcgaaattaatgcttgcacttttccttctttcaaaccaaattgtaataacttttgtatacctgtattacccgtttcatattctctcttttctgtatttgaagatttcactaaacgaatttctgataacacttgcgttaacacacttgtaaaagatgcagtttcatcttgaagtgcttttgaaatcttatacatttttcgtccaagtggaactaaaattaacacagacaacggaataaccgttaaaagtaacgcagtcattttccaatctaaaacaaataatacaattaacgatccaacaattgaaataccacctgttaataagtttgacaaatgctcagaaattaacgttttcacaacacctgtatcattcgtcatacggctaatcgtatcacctgttctattttgatcgtaataagataccggcaagataagtacctttttccacaaacgttctcttagtcccgctacaatcttctgcccaatataatttagtaaatatatagacaaccctgccgcaatagtttgcattacaaagaaagcaattaacccaacaatttgtcctgcactaattgaagaaagcgaaaaattatctactaatccttttgtcagcataggaataaataaactcgctcccgtagaaagcaaactcattaacaacgcaaaaactaaaattcctttcggaggatttgtatcttgaataaggcgtaaaaactgcctccaactcccttttttctttatttcatttctaacttccattcctgttcatctcctcatgttaaacaaaactgttctttctaaaattagaatacgatacaaatgtaaactgaatgtaaacacactttttctatttttacaaaatatacataaaaactcatctttacaacagatataaacatctgatattattacctggtacttaatattattctatgtaaattatagataaataatttaaaacacgatataaatctccagttagtgaaaggagtatcctttttgcaaacaaatatacattctgaaaaggaaacaattatttttattcatggattagttggcaatcgtcgcgccttcaaaaaagagcaaaaacgattttctgcctcctacaacattataacttatgacttattaggtcacggtgatgataaaggagaagcaatcgacttttcattacagcgcctcgtagatcaattattaaacttatatgaacaagaaggtattaaaaaagcacatatttgtgcgctaagttacggctgttacatctctacaatttttgcacaaatgcatccagaaaaggtattaagtatttgtcatattggaggacattacaataacccttctcgtttatataatgtatttcaaaatttttgggagaagcgaggagatgaatactctaaatggctctctcaatacgcaaatactatttttccaagcggtatattaaaagcaaatccgttcgcagtcatttcaagaaatatttactaccgtttcggattacaattacattcatccataattgcccagtcattacgacatcggttagaattcgatttaaaatctaaattaaaatcacttcctcaccctatactatgggtaatgggagagcatgatcatctctataaatcttgtctatttgatttgaaatctattttgcctaacgttctatataaggaaataccgttagcgggacatgcagcgaacttatttcgtcctaactatttccatgacttatatgatcgatttttaaatggaaagttaaaataaaaactattaaacttccaatttattcaactataaaaaggcttcccaagtttccttggaaagccttttctctatacgaaaagtatataaaactactttttcttagtatgcttttgtgtaacctaataggtgcttgctccagtaagagttacttacagaactaatacgtacaccagttgcatctgtttctgcactaatgaactgaccgtttcctaagtaaacacccatgtgagaaggacctgatttataagtattttggaagtatactaaatcacctggttgtggattgctagtttttgttttagagctccagtatccagcaactgtttgacgagcgcctttatgaccagtttgatttaatacgtagtgaatgaatccactgcagtcaaaaccagcaggtgttgtaccagcagttctgtatggtgaaccatttaaagatctagcgaatccagcgattgaagatgtatctccacctgttgttggtttttgtacgtctttacctggttgttgaacgttatttgtaacattattgttatttgtaacgttgtttactccgccttttacaaacttaacgaagtctgcacttacgtaacctgtgcggccgttatggttaattttgtaccaaccattttcagcaccagtaacgtttaatactttaccatttgttactccaccgattacagcgttgtatgtagctgggcctgtacgtacttttaaagcaccagtgttaacaacataagaaccaccagtttgaactgttgtagtattgttgtttgtagttggttgttgtgtttcgttagatacagcagaaccaccttttgttacgaagtctttgcttacgtatccagttccaccattgaagttgattttaaaccaatcttgtacttcacctacaacttgtactgttttacctttgtttacagaacctaatactgtatgagatgtacttgggcctgtacgtacgttaagtgaagaaacgtttactgtgtaagtacctgttccttgttgaacagtcgttcctgttttgccaccagtcgttacgaagtcaccacttacataacctgtttgaccatttacgtttactttgaaccaaccattttcttgtccaactacttgtagcacttggcctgattttactttagaaataacgttatgtcctgtaccagcacctgaacgaacatttaatacatcagcagttactgtgtattttaattcagaagttgtttctacagtttttgtttcagttacagtcgtttgagtttgagtttgtccattaatttcttttagcgcttcatttgaaacttgtgcatgagcagaatccattcctggaactgcaacgccagctacagaagctgctgctaaacctgcaattacttttttcataagttgtctttacttcctttccctactatcctcttaaaaaaaactaaaactttaatactttacaatattatcaaagtaaaatattcatccagttccattttttagcaagagttttatttttcacacagagttcattttaaatgaacaaagtgaaatccgtgtgaacttcatgtgaactttatcattaaacacagtgtttttgcaatggttttttcaaatttcttatatatcgcatgaaaattcgacattctatttaatattttaatataaaatatcccttttctatctattataaaaaattctattaacctaatacaaactcaagtatgtatttccttataaagctccttacatgaagtatactttcatcatgacaaaaatcactctatttatcaatagtataatatttttagaaaactaaatttctatactatctacaattttgaaataatttgacgaattgtaagatttatttcacaaaagccatttctcctttaaagaaaacacacactatatcaactgttctctttttcttataatggaatttataggatatttataggatatttatagtattatatacatatcttaataaacaagaattttagcgaattaattaaagtttcattcccttataaaatgaaactttaatcaggaagggttttatacatcctccgctaattattaaccctcaccactcgggctgcccattaatgcggagttttattggaataaaaagaggaggcatatttgtgagaaatataatagatgatccaatacaaaaaaacatagagctatactatgcttttattcaattcgtttcaatgataacattacaaaaagtatcagctattgaaacacgtaaaaacgaattaaaaaatcagatgaaaaatgccggacaaaaaaacccttattacgtataaaaaaaggtgaacaggttatattcctgttcacctttttaaattatttataaattttcacacggtcctctagcggttggaattctttttcaccagcatgtactaccggtttaccaaatggcatttgtgcaataagtttccaattctctggaacatcccactcttttctcacttcttcatcaattagcggattgtaatgctgtaacgtagcaccaaacccttcaatttctaaagctgtccaaattgcaaattgtaacattcctgatgattgctgagaccaagttgggaaattatctttatataatgcaaagttagcttgaaggctttccactacttcactgtcttcaaaatataaaaccgttccataaccacttttaaatgcattcattttttcttcagtaggtgcaaagttattttcaggtacaatttttcgtaacgtttctttcgtaatatcccataatttatcatgttgttctcctaataaaacaacaacgcgagcactttgagaattaaaagctgaaggtgtatgttttacagcatgataaatcacttcttgaattttctcatcagaaactacttgctctttactaattgcataaatagatcttctgtcttcaattgctgagtaaaaatcttttgccatcataattccctccaattttcaattgaggctattttatatgtatatatcatattacgcccctcaaacttattattaataagcttataactttataatatcacagcaacaaacaaactcaaataataacacttatatttagaagctttttcctttttaaaataaaaagactgtttgttgttatctaaaattagtaacaacaaacagtcttacttatgtagcgatctagattcgtattttacttacttaattaactaatccaaatgcatacgacattaacttatttgtctctgtaaaacgttttgttttactggatgtccccatgaccactgtaataattcgattatcaccttgctttgcagtcccagtaaaacagtatcctgcactatctgtaaatccagtctttagtccgtccattccttctatatataaacttttattatttttgtttaacatgtcgtttgtgcttataacattaatattattaaatgctagctgactttggcgtaagtgagtcacttctaatatttccggataatcttttataagatgatacgccaattgtgctacatcaccagccgtcatttttgtttcacttccatctggctcttgtaatccagaagcatttgcaaatttagcatgttccgacatttttaactgtttcgcttttgcatccataagctgaacgaaatctttctccgattttgccatatgttctgctaaagccacagccgaattattagctgactcaatcattaatgcatgatataaatctttaacagttaatgtgtcattaacttgtactgggattctcgctccttctgtttgtgccgccttcgcactcatttttactggatcttcccagcgaactttcccgttatgtatactctctagtaagagatacgctgtcatcatcttagacatactagccggtgcaaaagcttcattttcattatattgataaataatatctccatcactcgcatcgataatcatagctgcttttgcgttaatttctggtgggatgtactttggcgggactacttttttagtaaatcctgctttaggtagttctgccacttgcaaaggttgtccctctacattcgctatgctcttttgatttccttggaataagaaccaacatatccctaaaataataactaataggactgtcatccttccccattttaaccgattcatttcaaaactcctttagcaaaccttttatacactcacatttaaccttaacaacaattcctttatatagtcaaggtaaaaggtatatttattcatatacagcaatgattattttaatttatttatgttaaacttacaatattgaaacgtaagaatattcaataataaaatctcgtaaataaagcgaaactttaatcagccccaccaattgggctacccgtcaaatagcgagataaactatttaatagaagggattcatacaaatgctacttccaaaatcattaaaatacggagacacagttgggatctactccccttcttcaccagtaacctacacttctccaaaaagatttgaacgagcaaaatcttacttacaacagaaagggtttcatatattagaaggttcattaacaggtcgatatgatttttatcgttctggtagtatacaagagcgtgctgaggaactaaatgtcttgataagaaatcctaatgtttcttgtattatgtcaacaattggtgggatgaattcaaattcaatattaccttatattgattatgatgcttttctaaagaaccctaaaataatgattgggtattcagatgcaactgctttattactaggaatttacgccaaaacaggaatccctacattttatggaccagctctcgtcccttcctttggcgaatttgaaccttttgttgattgcacatacaaatattttgctgaaactttactacatgatcattctcttccttatcatataaaacaaccattattttggtcagatgaatttattaattgggaagaaaagacgaaggagaaagaacttcgaccaaacgattggatttcagtaattgatggaaaagctactgggcgtattattggcgggaatttaaacacgatacaaggaattttgggtagcccctatatgccacatattcaagaaggcgacattctctttattgaggacagttcaaaagatgcagctactattgaaagaagcttttcattacttaaaattaacggtgtattcgataaaatttcaggtatcattcttggaaaacacgagcaatttgatgattgtggtaccaaccgaaaaccttttgaaatactattagaagtacttcaaaatcaaagaattccttttctagctgacttcgattgttgtcatacacatcccatgattaccatacctatcggtgttcaagtagagttggatgcaacaaataaaacgatacatattgtagaaccttggaaaaaatgaattcatagatagcttctattgttttacaataaaagccatgatactatataatttggaatgtgaaaggttaaacaaaatacgttccaatatatatcattagaaaaattaggtataaatatatatttatatgcaaaagagagtgaataaatgaaaccaactattaaaaattacgtatttttacatgtagcttttttgatatattctatcattatggtttacatgaaatgggcagctaaattccccattgcttccatctcattttttgttgcttatttcggactagttatacttttattcggatatgcaattttatggcaacaagtaattaaacatttcgaaatttcaaaagcatattcacatcgcggaattattatactgtggtcaatgctttggtcagtatttctatttggagatactattcagtggaatcatttacttggtgcagctattattatcgtcgggattgtggtggtgacaaaagatgaatagttatatgttattatttattttcgggataattttagctaattactcacaaatattattaaaaaaagctactttgcaacaatacgattctagaataaaagaatatgtgaatccttatgttattatcggctactctttatttgtaattaacgccggattaaatgttatcgccatgaagggcatggcattaaaacaagcatcagcattagaatccttaagttatatcatcatattaatttttggttggtatttcctaggagaaaaaataacgaaacgtaaactcatcggcaacatgattattatcgttggtgtaatcgtttattgtatccaatagtaaaaagctccgtttatcacaaacggagctttttactattgacctaaattttgcactttatctttcaaatctcgaacttgatctaccgtctgcataagctcagagtttttaaattgctctacatccactttgccttcttctatctttgtcttcgccgtatcaattaacgtatttaacttttcgttatatccgacgatttgttgatgaagatcctttgctacatcaggtggcgttaattcattgaatgcgggtatatcttgtttaatttcactaagcttcgtttctaattcttttcgagcctcgctatcattaacggccttttctgctaatgctggtgcatcatttgcaaatgcacttatttcatttacatagtctgtcgccttttgagcataatctatggagttctttccttcttccactattgaacatcccattaaaccaattgaaactatgaatactaatacaattgattttattttcattttagacccccttcgtccttataattgtctgtaattttctctatacataacttctagctaaattgtttatagcctttttcaaatagctatttaccctcttacatgccctattatcgttacaacatctatttctatatgcacgcttataatatcttcaattatatccatatacccttgtcctatagctgttccatagtgtaatgtaagccccttcttttcatacactgactttggcactgaaaaaataaatctcctcaaatttctttcatcagctggttccataattaaaacaatcccatcctcatcaaacatatacgctcgccctccaactttacattcactatggctcagtattgccttggtcagcaaaatttaaaacataataagttaagatacactctgctctatcataaagtgaaactttaattagccctcaccagtcgactctttatcggcaaatagcgggataaaaataaaaagcattcattcttttttgttaagaataaatgctttttaaaaaatcaatttctaactctaacatctttttttgacgaggttttactttccttacgggaactccagcgtaaatataccaatcatctaaactctcttttaccatactcatcgcgccgactgccgtaccttctcctacaattacatttggaaaaataatagaattagcaccaataatcacatgtttttttaaaataactttttctgctttcacattcctatattgattcgggacggttggccccattaatgtatttccactgaaatcatcaagtactgcatatacgattgttttagctgagatgtttgcaaaatcatgcatttcaatcccaacttcccctccatataacgctgtatacgctgatatgtgcgaataacttccaattgtgattttaccacttaaaatgcaaaaatcatcaattcttacatgattgccaactgatatagcactcggattatatatacttgcttttttactaaccaatacatttttcccaacagataaaaatccaattttctttagttcttcttgactataaaaactattcatctaccgacaccaccttctgctctaaacagattacaatttgctctactagttctttcgtcatcccttcccataaaggtaaacttacgattcgttttgctattttattcgtttttgttaaatctgtcgacttatagtttttaaaaagaacttgttggtggcaagatggtgaaaagtataatctagcttctattttctgttttttcagttcttcaattacttgtatgttgcgaacttcttctggacaaatgataggcataaattggtgaataactgcttctgtcttttggactttccacccttttttcattaacccagtattttgtaacaactgtttataccattcagaaatacgggtacgttcttttaatttttgatcccacttttttatagtcgcaatcccaatagctgctgcgtattcagacattttacaattaaaccccatcatcgtacattcacgatttttatcaaatccgaaattccccattcttttaatacgttgtatatcttcttcgtttttactatatatgagccctccttcaccaattccgaatggctttgttgcatgaaagctatatacgatcattccactaaaatcttgaccgtaatgcatccctccattcattaatccaaatcccggcgccgcatctacgacaaccggaatccccttcttctctaattcttcatattcttctaagttcatccatgatccaaaagtggcgtacgggacaacaatcgcaacctcttcttttaattcttctatcttatccaaaagtacggttttatccatataccaatcatctattgaaatatcaataaagtaaggttccaatccacaccaaatagcggctaaggcagtcgcagggaatgtaaagctaggcatgagagcatactttccctttcttcttttctttagttgaatagccgccattaaccctaacgttgcgtttgctactgttgtaacagctcccctgttttgaaaaaatgacgacataattgtttcctcaaaacgttgatttataggtccataattcgtatatatgtgagatgtatcaatttccttcaattcgtccaaatactcacttacaggtacagttgaagcacgtaaaaaaggaatattctccatatctattccttcctatcattttcggacaatatagagcatatctgtttcagataatccaaatttcctagcacttttcattccttgtttttccgctatgttatataattctaccttaaatcctgcattcattaatcgttgaataaatcccgattgattgtaaattctcacatgatcttcttgaccaaaagctaatttcctcaattgtggtgttacaattaattcattctctataataaaatctacattcattacgattggtacttgaataattccccatccatttggctttaacactctatataactctcgcattgctttgtcatcatcaggaacgtgttctaatacatggctacataatattacatcaaaagtattactatcatatgtaattcttgtaacatcaatttccttcattaatggatcctttggttctaagtcaccacatacatacgtaatatttttatactcgttaaaccaatctcttaactttgcttcaggtgcaatatgaagcattgtatagtttctatttaacaagtccgtttccgtttcaatgtacgcacggtacaatctttcacgatccatcgaattacaaactggacatatccctgtatctttattccacatttcaaatttatatttcggaaaatcataatgtgctggccaaggtgaaaatttttcaaattgttgattgcaatattgacaataacaacattctttctcgaacatatgagcaactaacttgtttaagcctttttttatcttttcattataaatttgatctagttcgccatttcttactgcatccttaactataaatcccgcattttctaaacaataagataaactctctttatactcactttcggagcttaaaaacccactattatatgcatctataattaattcaatccactcttcaattgtcattaaaataaaatgcatttgtttttgattttgtccactatgctgtctaaaataactaagaggttcatgtatataaactacttttcctttcctcatcatatctagccaagttgcaatgtcattaatagcagaataagcctttcctttaaaatatccaaacttcccgtcaaacaaattccgattaaacaaaacagttgtcggctcaccaactacatttttcaagttttttaacatataattccctaattcttttccttcaaaaagtgtagtttctttcgcgattttcatatttaatgttgaaggtagtaatatctctccattctcatcaatcagttcacgatatgacgtcacaaatgaaatattttctaacgccaaaaagtatttcatcattctctcgatcttttcatgatgaaataaatcatcatctaataaaaagtttatatagtccccattcgcaagttctacacacttattaaagttttcggcaactaacggcgtttcattttttacatatgtaatacactcatattcacgtaagtacggttgaatcatagcattgacttcattatttgtactgtcgtcagaaataataatttcaatattttcatatgtttgattcaaagcgctgttgagtgctaattccaagtaataaggtctattgtatgcaggaataagtatacttactttcggtaaagaagaattattatttatatgttgttttttcttttctatgtttattttcttcgctctaattttttggcaatagtctaatgtatataatattgatgatggaactatccttcttgcataatctagaaaattagttatcgctttatctaactctttttcagtggataagaaaccatattgttctcctgctataatactgtgtgaaaaatcttctaacccatccatcattttattagattcatttaactgttgatctggatgtaatcgaaagtaactaagtgtctctgctatatatacagcttttcctttacttaataaagataaccatgaagctatatctacgttacataaataccgcctcttatcaaaaatcccaaacggttcttgtaaatcatttttacgaaataaaactgttgtcggttctccaatataatttttttgatccacaattaccttatttcctaattctgttcccgctataatggtatcctcttcaaataaacggacagtcgaataaatatgtcgtagctctttccctttatcatcaatgacttgacgatgagatgttacaagcttaatttcattatctaaatcatcgaaaaaatacttcatcattttttcaattttattcacatgaaatacatcatcatccattaaaaaatttatatattcaccgttcgcttcattaaataacattagcgcattttcaaattgtccgagagttgatctattttttatataaataatatttgaatgatcacataagtatttttgtaacactttttctgtttcatcattcgtgctgtcatctccaactataatttctatattagggtacgtttgttctaacacactacatagcgccttttcaaagtaacgaggacgattatacgtaggaattaatacacttaccaacggaagttgctctaccacctcttcagttctttcaatacgagttctcattttaactctctcacctcttcgcatattatttatatacgcgacacaaaaatcacattactttaactgtatggagcctatatacttttatgcaaacatgaaacaaattatcatacttttcgttcctgaataaacatatttaataatgcggacattttatttgcaccttttttattcatatgatcactatcataaaaatcatcgtcacaaaataatggcgaatcaaatagatctatgatttgaaaagaatattgagtttgaaaatcatttataactttataaaaatcttcttttaattttttactactacaattgaaataatgtgaagtaacagggaacacaacaattagtggctttatatcattttttaacagtaaatctaaatattttttaaaaatcattttattttcaactaaagtatgagggtacgacaatttagcatgtgaagctgctcttattttcccgtgttcttcaaaaggaatgtgaagaggagtggtattccactcagcatttatccaaggcagtatcaatgattcatcttttagttcatctaataaaatatattcaaaatgcaaatttaaaatagaaagaagtggtttcggagtatttagatgtgagaatccatcagtgggtagaggagagtgaactacagtatgatgaccatcttgaaacaatggataatatactttgtgaattctatatgattcggaggataacgacatatcaaagtaaaacgagaaataggctattcctattaaacaatattgaaatgaatgattgtttgataaaagttgtgacgctattaaataatcatagtatagatcttgcgatggaagtgttaattttattgacttttttgagagaagctccgtacttatgccacaatgcggataagacaaaccggtagcaaacaattcatacgtcggatcactctttgcttttttcatagaaatgtataaagacataagatccggatttatttgatagatagaaattaatttatccttccattcatacatgtattttgttaaattaataatttttgaactttgcacgcccctatttatcaagtcatttgtaagtttttctgcgtcccctctccaaatgactatatattgaaaagaactttctatacgaacaacatctgaaacgtccacaacatgaactattgttttacatttatttttgtctaacgtatttcgaatcctatcccctgataattcatcacttaaaacaatgattttatattgttccttcatgtacatcccctccattatatgtataatatgaaattcatttttaattcgtaacaatcatatacacctgcaatctaacaaaaaaaatagctccaccattaggcgtagctatttttacaattattgcttattcaaattatattcctttatctaactcataaagtttacgatacttttcattttctttcagaagttgtttatgactaccttgcatgacaatttggccacgatcaaggaatataacttcgtctacatgttctattcctacaagatggtgcgtaatccaaataaccgtcttttcttccgttgcagaaaacattgtttcaattaaagacaattctgtttttggatctaaaccgatagtcggttcatcaagtacaataattggtgtttcttgcataagagttctagcaaaagcaaccctttgtctttccccaccagaaaaccgctttcccatttcatgcatttttgtttgtaatccgtctggaagagaagtaacatgtgaagctaattgtgctttctctaaagctttccatatctcttcatccgtcgcctctggtttgccaattcgtacattatttccaattgtcgtatcaaacaaatgcggcttttgatttaatacagaaatatatttagataaaagattcgtatgagctcgttcaccatttagtacaacttggccatttactgggcttaacgcccctgttaacaattttagtaaagtagatttccctgtcccacttctccctaaaatagcaattttcttccctgtttttatttgtaatgatacatcttttaatacaatctcattactatctggataactatacgatacgtgattcagttcaatatctacatgttttggttcaatataatctttctctccatgcaaatccgtttcatcatgtaaaacactatcactttctacgccattaagacgatgggtagattctacatacgacggtattcgatcgatggcatctgcaataggaataagcgcgttcgttacagataaagtcattaatacgaaagctgcgataactgtaggagcaatttgttcacttgccgcttcattcccagtccatatgatcatcgaaataactacaatacctactactaattgaatgatactgtcccgaatatgataccagcgtttcactctcttttcgatttttaacaactgatcattttgttttacatactcattaataaattcatctttacgaccacttgcttgccaatcagataatccaaaaacagcatctgtcagttgttgatacaaacggtttcttccttgctttaaagtaacatgatgtttcttcatcaaaagtaatgatacaaacggaagaagaaaaacgataatagctaacatacaacctacaataagtgcaaaaacaaaatcaaatgcaccgataacaagtacgaagatactataaacaactagcgctaatatgctaggaaatattgtacgtaaatataggttttgcaaatgctctatatcttcggataacactcctaacatatcacccgtttgaaatcgagaacggaaaaataacgcctgtggttctactattctatatagcctcgttctcattttttctaatatacgtagtacgacatcatgtccgactaagcgctctatataatgaaatacagcttgccctatactaaacgctcttgttgcaacaataggaacatatacagccattacattttctggtctaagggcagattttgagattaaataacctgaaataaaaagtaacatcgctcctgaactaactccaagaagaccaaggaaaatagttaaagtcattctacctttattttgttttatataaggtttaacccagttactcatttctctcccctctcttccctatgaaaatgtaatgtctcattctctaaaagttcttcatacgtcccactttctttcatttcccctttatttaaaataagaatatggtccatttgtttcatccaatgtagacggtgggttgctaaaaatactaactttccattaaatagacgtaacatcgcttgctttatttcaaattcggtttcaatatcaagatgtgccgtaggctcatctaataaaatgattggttttttacttaaaagcgcacgcgccatagcaacacgctgttcttgtccgccacttagcatacgtccaccttctccaattctttcgtgcatcccatttggaagtgatgtaacgagtgaacgaaggccgacttcattaataactctttcaacttcttcatctgttgcatttgtttcataaaaacgaatgttatcctttaatgaaagcggaaaaatataaggttgctgcggaatataagcgatatttttttgccaatcttcacgagtagatccatcaacttctacaccatttactaacatctttccactcgaaggagataaaaaacctgctaatacgtcgattaacgtcgatttgcctgcaccactttcaccaataacaccaatagcaccgttaccttcccaagtaaaattaattccttctaatatagccttttcagattcagtattattaactttgatgtcttgtaatttcaagctactagaggcattccatactatatcttcatttaaatctttcttttgtattcctttttgttgttgcaaaatctcttctatttgctccatcgcaatttgtccatctaatgtcgcatgataatttgctcccacttgtttaatcggcagaaaatattccggagctaaaatcaaaattgtaagggctggtaatagtataatcgttccatctattaaacgtatccctaatccaactgccacaaacgcaattgataaactcgtaaagaaatctaatgcaaaagaagaaagaaaagcaactcgcaaagtacgcatcgttgcttttctataccttttacttactttttcaatctttccttcgtgctgttcacttttccctaaatactttaatgtttctaaaccttttaacgtatctacaaaatggttcgaaagtacacgatatatctcgtactgactatctgccattttttgcgctgccaatccgagaagaatcataaatatgatcacgataggaatcgttacaactaaaatgattccagactcaatatctagcgtaaaaacgtatagtacaattagacctggaacgatgctacttctaatcattttaggaatcgttaattcaatatatgttttaaatttctcaatcccttcaattgataaggtaaccagatgaccagttccaacagtttgaacataccttggacctaatgtgaaatatgcctctattagttgttttcttagtaacgaccctgttttttcagcaaaacgttccactaatatttgtgatgttcgaactactatgtgacgcgctgcaaacgcgataccaaaataaacaatttcacttaatattgtttgtactgtctctccatgaaataaaaacgtaatagctcgtgctaaaaagattgtttgcgcaataatactaaaagcttctaaaatactaataatcgttaacgctacatataaaatacggctaccgggataagacggaagtcctctttttcttttcattagtactccaaatcgttgtctgacttaacaggttgtctaaatacataataactccatatttgacttccgataacgaaaggcaaaatagcaatcgcaaagtaagtcataagttttaatgcataagctcctgatgctgcgttgtaaattgtcaaatcattcattgctcctaaagagctaatcataacacgtgggaacataccgataaatacactcgcacttagtaaaatgattgttaaactcgtcataaagaaagcccaaccatctcttcttcttttatttaataaagtggacactaatagtgctacaaaagctccgattggcaccataatccattctgttccatgagcagtgaaaatgtcggttttccataaccccacaccagcaaaaacaagaagtgtaattaatgaaattggtgcaatttttattgcagcaattcgtgcacgttctctcaatttaccagttgtacgtatcgtaagaaattgtaatccgtgaacaatacatagtaggagaaacattactcctccaagtaacgcaaatggatgaagtaattgcaagaatccacctacaacatttttactctcatcaataggtacacctaccataaagtttgcaatcgcaactccccaaaggataggaggtaacatacttccaataaacatcccccaatcccatgcactcttccatttatgattatctattttcgcacgaaatttaaaggaaacacctcttaaaattaaagcaagaagcataaatacaaatggaatataaaaaccactaaataaagttgcataccagtgcggaaatgccgcaaacatggctccaccagcacaaacaagccatacttcattcgcgtgccagaacggtcctattgtatttaagtaaactcgtttttcaaaatcattctttcctaaaaacctcgaaaccattcctaccccaaagtcgaaaccttccagtacgaagaatccaacaaacaagattgcaataactaaaaaccataactcattaagagataacatactcttcctccttatcaaatggatcatggctttgataatcctttttcgttttcttattcttgtggcccttaatggtacgaacaaataagtacacacaaattccacccataattaaatacattgatgtgaatgaaataagtgagaataatacttcaccgaatgttacatttggtgatacagcatcttctgttttcattacaccaaatacaacccaaggttgacgacccatttcagtcataatccaccctactgtattaccgatgaatggaagagaaattgcatacaccattaattttaaataccacgttttttccgctaaacgatcttttcttgataagaaccatccgtaagctcctagaagaagcatgaatgttccactcattaccatcgctctaaaactccaaaacattgtatgcactggaggaatataatctccaggtccatatttttcctcatattgtttttgaatttgattcatcccttcaacttgaccgctaaacttatcatacgataatagacttagcatataagggatttgaatttcaaacgaattttctttcttctctgtatcaattttcgaaaatactgtaaatggtgctggatcctcacttgtattccatagcgcttcagctgccgccatcttcattggatgtgtcttaattaattgttgcgcttgtgcatgaccgaagaataatacaagcgccgttgtaattgttccaacaatgatagaaattcggaaagattttttaaatactacagtttcttgtccttttgtaattttccatgcacttacaccagcaataaagaatgcacctgttgcaattgccgctgtaattgtatgcgggaattgtacccatagttgtgggttttgaataatggctaagaaatcattcatttgcgcacgaccatcagctgccatttcatacccgacaggtgactgcataaatgcacttgcagttaaaatccagaatgctgataacatcgttccaattgaaaggagccaaatacacattaagtgaattcgcttcggtaatttatcctcaccgaatacccataaacccaggaatgtagactcaatgaaaaatgccagtaatccttcaatcgcaagtgatggaccaaatacatcacctacaaaacgtgaatacgttgaccagttcataccaaactgaaattcttgtaaaatacctgttactacacctactgcaaagttaataaggaataattgcgtccaaaactttgccatcttcttatatacttcttgcccttttaccacatacaacgtttgcatgatcgcaataataaaagctaaaccaattgacagcggaacaaaaaagtaatggaaaatcgttgttgatgcgaactgtattcgtgccaattcgagcgtttccatactaaaatcacttccttcatagtttttataataaaagttaattgagcaatcttatcaaactcaattattaagaaatacgaaaagacaaaaacattttgtatgtattgtcgaaaaatatgaagtttcagtttttcaaactattgtaatgctattttttaccttttcactatttctgtagtgttttattcgttaatcgaattgtataatatacctgcatagtaaattcaggttatttttgacgtattattgacatcattttgtctgaaatatgtcttttgtcatttttttgaatcagatttttctcattagcaaaatgtgttttttcaatatacttcttacttttatatctataaaacaatcgtttttctcttcatacacttgactttcacccgaaaaaatgtcctcggaactaccctcgataaacgcttgttttttgtcaagagaaaaatgtatttttaaaattcaaactcgaaataatgttattcaaaaatagaaaataacttccctcttcctcgactaaaagttcatttttttgtcatttttccagaacaaataaaaaaaactgaaagtcgattagactctcagtttttttatttattttgctgtatgttttctaacggctggtaaaatttcagtagcaattaattcaatatttttctcaattttatcaaatggtacaccgccaaaatcaatttgtgccataaagcgttgttggccaaataattcatattggtacagcattttctcaatgatttgttgtgggctaccaaccattaaagcatcacggtaatctattgcatttgtaaattgctgtttcggatacccaccaccgcgcagtgtaagcataccagcattaatgtgagggtaatattcactaagtgcatcttgtgaattttttgccgtataaaataaactcgttgtcgcaactggtaaactagctgaatcaaatccactttgtacagccgcctcgcggtaagcatctactgacactttaaagttaattgctggaccaccaagtgttgttatcatcattggtacacccgcgcgtcctgctttaattgcactagctggtggacctccaaccgcacgccaaattggtaagttattatttttcgctctcggaataaccgatgcatgtgcgagcggtgctctgaactgtccattccatgtgacatgttcctcgttattaatttttaataaaagatccatcttctcttcgaataattcttcataatcattcacgttataaccaagtaaactatatcccccaatacgagatccacgaccagccacaatttctgcacgtccattagaaatcaagtcaattgtagcgaaatcctcatatactcgaactgggtcagatgtacttaatatcgttgctgaacttgcaatttttatatttttcgtagcttgtgcaatagctcctaaaataactgtatgagcttgtgttgtaaaatgcgtttgatgactttcaccgacagcaaacacatcaagccctgcctcatctgctaacttagctgtttcaattagttcgtgaattcttttctctggcgtaattttctccccattatgtggatttaaaacatgatcaccaattgaatataatccaaactcaattccttttcttatatctatacggtatttttccatagttactctcccctttaataaagtagtattagtttttttctaaaaacgttggtaagtcaggtatatctccgtattacctacgccttcacttgattagtcaattgatagtgtaaaaaaaattactcttgcggtaattcttttttttcactatgcttatgaactttcgtcattagctcgtataatattttctgctcttcttcatttaatacatcatcaaaaaacgaagattgaaatgcaagttgctctggcaatgctttctctaaggccgattccccttgctctgtaagactaattgttttcgttttccaatcttgttttcgtacaatatatccttctttctcaagacgagttaacattcgagaaataccaccttgtgtaacagttaccttttcagctaactccatttgtgttagtggctgatacgtacgtatttgcaaaagcacatcaaattgagctgtcgttaaatcaaaacgttttaaaaactcatttgacatttgattactttggttcgtaaatcgtattaaacgtaaccatattaatgatcctatcgtattatcacgcatgttttgtcacttcctagcgttcatcttactatcactttactacgcaagtgataaaaaagcaagaaaaaatgtaataaatatatcgatagagtattgcataaataatgataagtaagaattcatataaacatgaattcttacttatcattattcttaactttgcctttcattcattactatatttaaagctgccatagcttttggccaaccaacgtaaaaagccatatgtgttattaatgcaaccaattcattctccataaccccattttgtttagctagcttcagatgaaattgtaattgttctgtattaccgagactgattagtgctgacacagtacacaagcttctttctcttaatgttaaagtggcatcccgccacacttcctcaaataatatcttttcactataatgagcaaatgcaggtgacatttctctcattttctttttaatatgtacttcaataagttcatttttttctccctttattttcaccatttgtgctattccttgaccaaatgaccagttttcagcagctgtctcatttaatgtaataaaaatatccgaagttttaacatcggaatattccgtaatttttaaggataccgattgatacaaatcttttttctgttgcactgttcttcccggtccacatgtaatagaaacataaatcatattctctgttctcttttctcctctttccaacaaataatatggattatataaaaatttgttttcttggtaaggtaagaacatttgaaaataatcattttcagggatgttaaaatgttcaattaatgaaagatggatacattcacccattttttccaactcttcttcatttaatatgttttcaggataataaatcttcacaaaaggcatagactttcattccttttcttatttttaatatgcaacaaaatttcatcgtgaaatgtgtaaaatctcatatactgtaacacctttattcactgcaatttcaggcttctcctcataaaaattaaacctactatacccccatttatccggattataaacgattacattccctaaacacttttcgttgttttgtacatcttcattcatagtgcttaattgagtcccaatcagtgttttactttgagaaatacttcctgcatattcaacaacatatctacttttcttaaatccatcacttagattaaccactaatggaacacctatatgtatttgttgccatccaaaagattgtaaaatgttatcgtaatacccttcaaagataaatttattcatcccttcatgaccattccaaatatataaaggtgcatagcagttataaaaattcccgtctttctccgtttccgtaattaaataagctttaaaatttagtgcttggaaaccatcagttttataaccattatcctttacccttttcctaataatttccatgtcataatcctttggcaaaatgaccttatattgcattccaatcatgtttatcactcgctttcaatcttatatacattatgataaatcgataagtagctaacgtaaaataggtataaattatgtttggtatcatttataatgatagtgcataaggggctgagatatatggaaataaatgatcttattatattcaaaactgtagccagtgagggttctattagtaaagctgctaaagagttaggttatgttcaaccgaacgtaactgagcgaatcaaaaaattagaacaagaattagaaacgcctttactacatagagataacaaaggcgtttccttattaccttctggtgacattttattagattacacgaataaaatattaactctattagaagaagtaaaagatgaaattaaaacgagtggttcttcttatataatagcgacgtcacaatctattttgacaaattatttaagtaagcgtattgaagaaaacttcagaaattatcaaatatatgtagaaagtagtagtcatttgcaaaaattacttcagcaacaaaaagttgatatggtcataacttatgaggattatcctgacgcatcgtttaaaaaagtgttcacaacctcaatttctgtaggcttattaaaagcgaaagaaaaatgtaccattgattattcaaaagaaattttcttcgttagcaatgacaaaaagtgcccttttaggaataagacgatacaatttctaaaagaaaataatttatctcagcgtcaacttcaacaattagattcttattcgcttatggaagagtttattcaggacggaaaagggatagcctttttgccgattaaaaatgataaattggtaccaattgaagatgttccagttgagaaattagctgttcatttttttgcaaatcaaaactctttcaaacaaatccctgatgaactatttggttaataaaaaaatccctcctttatgaatctaaaagagggattttcatattctatacaattgatttttcacacattttgctccacttctgcacttttctccttcttattccgtttcatattcttcagtcccttaaccgtcccaaccaatcctttcggaaaaacgagtagcacgataatatacaataaacctagaataatcgtccatctttcaaaaatcggatattccgtcgctagttctgataaataatattttagggattcaataatcccagatccagcaatagctccaattaatgttccgactcctccaatcattgtcatcaagagtgcatttagtgtcatttcaattgaaaatacagtcgtattgacaaagcgtaatgtaataacaaataaaccaccgctaattgcagctactattcctgccactacacttgcgattattttataatggaggactttatatccaagtgcttcaacacgttgttcattttgtgaaattgcctttaatactttcccaatagaagactttgtaaaaagacgtaatagaataaaaatgaagcataaacatacaagtgatacataataaaaagtaaaacgatcacggaatatttctggtaccccaaatgtaaaaccatctcctccgtgagtgagcccacgccatttttcagcaaggacgaaaaacaactgtgaaatagcaagtgttaacattgcataaaaatgacttttcaatcgtaaagaaagcaaaccaattatataactaacgattgctgaaacgataattgcagctactattccaattaaaaagttcgttattgatacgccttgtcgatcaaataaaagcgctaccccatatgctcctatcccaaagaacatacaatgaccgaacgatacaattcctgtatacccaagcaatacatcaaaactcattgcaaaaatagcaaagatgaagatttgagtgaacaaaattaacaggctccgtgaatcatttacgaacggaaatacacttaaacaaatgagcatacatactccgaagtatactttaattcggtccgatgtgttgttcaccatttcaccccttttcaccaacaagtccagttggcttcactattaagaaaaatagtaacattaacatattaattgcaagtgataaatctggtataaaatacgctgtaaaagcaccagctaatccgacaattaaagaagcaatagctgaaccttgtacgcttcctaatccaccgataattactactataaaagctaaaattgcatactgcatgcccatctcggcgaaaataacgcctgaatacggtgctaataagaatcctcccaaagctgccatccctgctcctaataaaaagacgaaagaaaatatcgcttttacattaataccaagcgcttgaaccatttctttatccattacacctgcacggatcataagacctatcttcgtctttttgagtaatagtagtagtgcgatgtaaataattatcccaatcaaaataacaaatagacgatatttaattaatataatacctccgaatgtaaaacttccttgtaaccataacggtaattttgcactaatagggtttggcccccaaaatattttaatacactcactaagaacgagcattcctccaagcgtaacgagcagctgtcgaacatgatttccatataccggtctaataagaaacctttctaaaataaatcctaggaacattcccatggctactgctccaactaaagctaatatataacttcctgtcatattaaataaccaaacacctgtaaatgctccccatgcaaataaaccaccgtgtgcaaagtttaaaacgctcattagaccgaaaataagtgaaagacctgatgctaacaaaaaaatgagcatccctgttgaaatcccatttacaaataaattgattaacacatccatccttttcacctcggattcatgttaagagattcctaaatatttatgacacatttccttatccttttttaattcattcataaaaccgttatgaacaattcgtccgttatccataatgtaaaaataatcaccaatttgactagccatcataaaattttgctcaacaagtaaaactgttgttttctctttcatcttcaaaatagctaccattaatttctccaccattatcggggatagccctttgctcggctcatcaataagtaataatccatcactattaataaacgctcttgaaatagccaacatttgcttttgccctccgctcaagagcccacttttcttattccaaaactgctttaaatccggaaatagttccagcatccactctattttcccttctacttccacaccttttcccctagcaagagcgaatgtttcttctactgtcaaatcatgaaaaataccttgattttctggtacataccctattcctttccttgaaattaaatgtgtaggtaatccacttacttttgcactatcataataaatttcaccatctgcaatgcggtgaaaccccataactgaacgtaatgtcgttgttttccctgccccgtttctaccaaacagtacagtaattgtccctttctcaacagcaagagatactccttgcaaaatatgaaactgatctaaatacgtttctatattattcacttgtaatagtgccactatataatccccctaaataagcactttgtacacgctcatctttcataatttcttctggcaatccttcagccaataactctccatgaaataaaacgataagatgatctgacaaacctagtatcatatccattttgtgttcgataagtacaattgtgctctctggatgtttcttaatattttcaatcacttgtaatatagcagggacctcctcaaccgaaatacctgccgtcggctcatcaagtaataacacatccgtttttaaagccaataacatcgcaagttctagctttcttttctctccatgtgccaaatctttcgctaatacgttctctttctcgtgaagtaatactgtttttaagaaacgtctcgcctctccaacttgttgctttaattttgctgaactcgggaaaaaactatagtaatcttgtacgaatgattgaacacttaaacggacattttcaagtaccgttaattctgggaatatgtttgtaagctgaaaagagcgaccgattcctaagcgtgttcgatctgaaatcgatagttttgtaatatcttgccctttaaaatacacttcacctgttgtaggtgaaatctgtccacttagtaaattaaataatgttgtcttccccgcaccatttggcccgataatagaaatgagctttcctttttggacagttaaatttacatctttaataacttgatgttcaccaaaagatacactaagatttttcgtctctagcaaatgtgtcacgaaatccctccctttaaagccgtgagtatgaaggaaatatgtataaagagggtcccccctctttatacaaaaacaacagaaaattcagtctatttattttgaactggtggttctgtttctttcatcgttaattctcgctctaacactggcaccggataatcaacaccatcttgctttttcaatgtgatagaatacagcgtctgcatcgcttggtggtccttctctctaaacttcatctttcctttcggtgtatcaaattccattccttccattttcttaatcaaggtatctacatctgtatcaccttttgttttctttaaggcttctacaatagaaattgctgctgacattcctcccgctgtaaacaaatctggcactacaccattaaaacgttttttatgctcttcaactagccaatcattcactttattttttggaagtgtgtgataatatacagaaaaaccttgcatacctactaatgcatccattgtttttaatgctggtatatctggcgcacctgtagaaattttaataccttgcgcttccacattcatatctttcaactgtttccaaggtgaatttgcccctgcccaaacaataaataaataatctggttttgaactaatgatattttgaatattcgctgtaaaatctgttgaatttgtatccgcgtattgctcattcacaatgctcgcacctaattttttcgcacccgctttaaatgcagcaatcccttcacgaccaaaagcgttatctggggcaaatgtcgcaatctttacaccttttttcgcaattgccgctgctcctgcaatcgcatcttgtgaggaacttcttccagttctaaaaatatatttattccagttcttcccggtaatactatccgcaactgccggttctacaaccataatcttttcatattccccggccagtggtaaaaccgctaacgtatcacttgaactagacgatccaactaaaaaatcaactttctcttcttctaataacttcgtagcttttttaactgctacatcagctttcgtttctgtatcttctacaacaaacttaatctttttcccatctactttcccagttccaccagttgcatagtctaaccctaattcaaatccgttcactgtttgttttccatacgattctagcggtcctgttaaagaagcaagaactcctaccttaatcgttttttcatcctctgtacttgttttctttcctgaacaagctgccgttattaataacgaacctaaaacacaaccagtaaacattgtctttagccacttacgttttttcatcgacattgtgatcctccccatactttactttctgatagaatcaaacacgccaaaatcccctgtccgtaatcatgactaactaattcgatagataatggaaaactcttgtagtaccctctacattcggcacaaatatataatcaccttcctatgtaatggaaacggacatacaatcaatatatattctgtaatccaattgaaaatactgtttcatttcagtaatgatcatacaaaaagactaacttattttttaagttagtcttttcaccttaattagagttaagttctactttctctaacccttcagccaattgtttcttatctagtccttctcctattactactaagtttgtcgggaaaccgaagtcttgttctaataaagttggtactccgaacgaatattggaataggtgagggtatttatctccacggaatttcacaaaacctttcactcgataaatactatctggtaaattcgaaagccattcatataatttgtcttgatcaatcggtttcgtaaattgatatgtcatcgtttgtatatgtaaatgctgtttgacatgtagtgtctcatgttcctcatcatttggaaattctgcttcctctatatcttttaaagatatattgcaatactttgtctcatacattttcgcatgatcatttattgcctttacttcttcaaatactgtgttcttatcttcatctgttagtaaatctgctttattaacaagaatgtgactaccaaatttaagttgctcatgcaatagctgttgtacatttgcacttaatatacttcggtttaaccaccttactgcatctaaaacgactacaattgatttcacttccagaaaaggagctaaaattggcgagacacacgcgtctaacacttcaattggatgcgcaacacctgtcgtttctatataaattacatctggtctttcttgttggtataacgaatgtaattgtatttcaagctcttcttttaatgtacaacaaatacatcctttaagaagttctcttaaaacattctcttttccaataatatctgtatctaccgagtattcaccaatttcattcattaatactgcaacttttctattcttctttttctctgctaacaataaattttgtaataatgttgattttccactacctaaaaaaccacctaatatatgaatctccactttattcattcaaccgaccatccatttctttacttcaaatgtattcaaagcgtaataattacgatttatatttatcattttattaaaagaatgaacatttgtaaatataagagattcactgttcatttacttcatatgcaactctaactccagactcaattgccccttgcatccatccatgtgttaatgtcgtatgctctcctgcaaaatgtacttttccagatggtggtgtaatatacggaaataactcgagctcttggcctggttcgaaagctgtaaatgcaccgcaagaatacggatttttactccagctaaaagatgttccagtgacaaactcactatagacgatgtcaccgtatatttccgctaaattttttaatgcgtaacgaatacgatctctttgcgggagactatcccatgttaacgcctcatctgcccacgtataacttgctataacgatagctggtcctggagtatgaatgccataactcggatagtatgtaaaccgtatcggtaaatcagtaatagatttacctccacactgtcccgctttctcccaaaatctacttttaaactctattgcaattttagttgcagcaatataatttaattcacgaattgctctttttttaaaataagagaataaatagtatggctgaacttctacaaatcttaacgctgaaaatggaattgtaataatagcaaaatcacttgttattgtaaattgctctaacgtttgttcatgatttccttgtaacattactttattatcttcttgtataattttatcaaccttatactgcattaaaatatgttcccttaattgtggtaagaatgcattcgataacttatccattccaccagttatttcataatatttcgttgttgaagtaaagaaaatcatttcacgtaatacttcaattaaggacattcccatataagcttccatatcaagaagtaccccaatcatatctattgcaccatctgaataatactccattaaaaatgaaccaagcgaatacgttttatactttttttcaacgataagccagtttttatcaggatccttcttaatataatttagtattggttctaatacctcaatcattagctcttctgccgtttttcctctttctttatccaaaaccggatattcaagtacacttggatcattttcaaacacattcaatctcgtttgaatgttattcgtataaatgatatctgcaaaagttttatttataaaaaggtttaaaggtagtttaaatttatgaatatacgctaaggttaacttatgggtgtcagggattctcatcggtcccgcattaaaatataaacccacactaaatggttcccgaatcgtatacactctgccacctattctgttatttgcttctataatcgttacttcgtgcccagcctcttttaataaagaacctgcaactaatccagaaatccctgcacctgcaatcgtaatccgttttgggttattctttttaacaagccctgcatgaataatatgaagcatttcttccattgttaatgggttccccataccatttccccttttacaaaggattttactgaattatattcggttcactgaattcctatgttttgttcgcagatttgcacggatacattttcaaatacttgaatatcttttataaaatgtaataaactagatatgactctatagaagtaagacgtattatcttacataacaaaaccaatgaaattgcgaggaattttgaaatgaaaaaaggtattaaccgtgttgtattagtaggaacaggagcagttggatgtagttatgcttactgcatgattaaccaagccgtagctgaagaatttgttttagtcgatgtaaatgaagcaaaagctgaaggggaagcaatggatttaagtcatgctgttccattcgccccagctccaactagagtatggaaaggcagctacgaagattgtaaagatgctgaccttgtagttattacagctggattaccacaaaagccaggcgaaacacgtttagatttagttgagaaaaacgccaaaatctttaaacaaatcgttcgcagtattatggatagcggatttgatggcatcttcttaatcgcaacaaaccctgtagatattttaacttatgtaacttggaaagaatctggtttaccgaaagaacgtgtaatcggttctggtacaacgcttgattctgctcgtttccgctatatgttaggtgagtacttcgatattggtccacacaacattcacgcttatattatcggagaacacggcgatactgaacttccagtttggagccatgtttccgttggtatccaaaaactacaaacactgcttgaaaaagacaacacgtataatcaagaagatttagacaaaattttcataaacgtccgtgatgcagcttaccatattattgagcgtaaaggcgcaacttattatggtatcggtatgtcacttctacgtgttacaaaagcaattttaaacgacgaaaatagtgtattaactgtatcagcttacttagaaggtcaatacggtcaaaaagatgtttatatcggggtacctgctgttttaaatcgcggcggtgttcgtgaaattttagaggttgaattaagtgaagatgaagaattaaaattcgaccactctgttcaagtattgaaagaaacaatggctccggttctttaattaagataaaaagcaatccaatttattttggattgctttttattttcattatctcctatgactttttagtgattttctatcatttcttattttttagtcgcatcctcattatttatatcaagtacatctaataaaaagataaagattggtatcccgataataagcccccatattccgaggaaatgctctgagaagataagaatcataaatgtgtagaatattggtaaatttgtttttgcagacataaacttcggatttaaaaaataactttcaagagcatggattactgttatgaatacgagtatgtatactacgtacataactccgcctacgttgtaagcaatgatacaaagtggaaacaaagaaataatcacacctgcaacaggaatcaaccctagtaagaaaatcataacagctaatacaagtagctgtggaaatcctaaaacgattaatgcaatgacagtaagaatacaatttacaacggcaattaaaaactgagcctcaattacttttccgaacgatcttgcaaatctttcaccaaaatatgcaatttcctcataaaagatttttaacttactatctttaaacttagatgtaaatgtaataatacgctctttttctaataagaaaaataagcttaaaattagagataataatatttgtaaacttaccttccctatatttgctattgattgatagatgacatctacaccttgttctatatattttgatacttccatcccattaattgtcgaaagtgcatatttaacgatttcattatcaggtggattttgaaaaaatagtttaaactgataaattaattgtgaaatttgtatcgtcagcacaggtaaatatttatataacgttgtgcctataaaggaaaccaatattatatataaacatgcaataacaattttccggtttactttcaattttcttgaaataaaacgttgaaatcgatccattaaaaacgtcagtataaacgtaattaatattaaattaatcatactttttaatgcgtataatacaagcgctactattattaaaacgagaaaccgttgaaaccctctacttcgaaaaaaactctttacttcattcattaagaattaacctcccccttcaatggatggaaattgaatatattacattttatgaactcctatagacaatctttcttactaattgggaagaatccttttttcttttttattgtcggattttttcatctaatacttttctaaaaactactttatcaattctatctttatctttcgttttttctgtcatagtatctttttcgtcataacctaccattacgattacaggaatactatataagttcgatttcttatttaacgctctctctttgtctaactttcgcgccacttccatcgcattaggattaatctctgtaacagcatttaatgctattccattttttcatgttgttctctccaatctacaagttgctcactagtaaattttcagattgaaaaaagagagttatcttcttaactctctctagacaaaatgctaaatgatacaattaattattccaatcaaatcattgctttttttccattcgcttcgctaacaattccttcacttggttataggttaaccctgaatttttatttaaacgctttacttcctcaacatcagtacctaccactgtatattttttctcatcattcatttttctaattcccttctcaccgtattatttcttatatttcttccctaaatacgcataaattaacaccactacaaaaaaggaagctgtttttaagcacagcttccttctcgttacatattgtatttcttaataaaatttcactacatcttcagtaggtaagaacgttctttctgctggttgttcgtttggttcaccaaatggcatttgacctactaagctccactctgccggaatgttccaagtttctttcacttcagcatctacgattgggttgtaatgttgtaatgacgctccaattccttcagaagataatagcatccacacagtatgttgtaacatcgcatttccttgatgagaccagaatgggaactgatctttatataatggggcattttcttgcattttttctacagttgcttgatcttcaaagaatagaactgttcctacacctgcatggaagccttttagtctttctacagtcgcttcaaagttttctgctggtacgcgggctcttagtgtttctttaacgatatcccaaaacttttcatgctctccatccattaatacaaccatacgaccactttgcatattgaaagatgttggtgcgtgtaaagctgtttttaacacttcttcaattctttctttcgtaattgcatcgttttttgctactttacgaattgaacggcggttcacgattgcttcttttaagtttgttgtagttgctgacattttaattcctccaaatgtttgttttataatttattttgttatttcataacaagcgaattagcaatatccatcggtattacattgcataccttcaaatgaatttgttttatccttttcaatttctttatcaatgaccctttctagtgtttctttactagcaagcccttgaatgacttcatctccaatcatgacagttggaacagccataatattcgcttcatcatatgcgtgttgaattgcttcttgatgcttttctttatatttacgagttactaaagcatctttaaattccgcctcaggaagtcctacttctaccgctaattttgttaacacatcaatatcttcaatgttttgctcttcttggaaaaatgctgtgaatacgcggtgatgatactcattacctagtccacgttctttcgcaaattgacatccttcgaaagctaaatgtgtatatggatgcggtgaaacacgtggcaagcgcatatcaattcctaacttcttcgctgtcggaagaatgaaagcatcccatgaacctaatttttctggttcattccatggatctatttttgaatatggacttggacgtaattcaaatggcatccattcaatctctacatctttctctttcgctacctcatctaatggaccttttgctaaaaaacaaaacggacatataaaatctgagtatactttcatttttacagtcataacttttacaccttacctttattgttgtaatcaaatcggttacattaatgacaaaaaaatataaatatgatttaagcattcattttttcttgcaaagtttcaaacaactgccccattgtaatatttctcaaaacttcttccatcgcggattgtgcttgaattaaaataatttctaacaccgcttgaatattcgcaccaattggacaatctggattcggtttctcgtgaatatgaaatagcttgtcttcttcgactacgttcactgcatgatacacatctaacaatgtgatttcatataaatcctttagtaatcccgcgccaccgggtccacgatttacgtaaacaaagccagcttgtttcaagtacgacatgattttacgaatgactactggatttgtattaacactctcagccatatagtctgaagtacaaagtgaagatggattgtttttcaaaatagataaaatatgaacagctatggaaaagcggctactaattttcatcgtaatcaccacctcgatgtaatcattatagttacaactaaaaaataagtcaatccttttcatagattttttataagtaaattaaaaagtgtcccattatgatatatgagacacctctttttattctgcaaatagcgattgaaattcttcaataaatagctgcacagcgattgaagaatcctttaatgaaggaacagctaaagcaatttctctccatacttgtggttccaattctctcgtttgcacattttttggtaaattcgttaaagataattcagctaatattgcaatgcccaatccttcttgaatcatatttaaagctgtagtaactgtcgaaattacatattcagcccgaagtggtacgtttgcttgtttaaacatatcaataatgggtggttcgtatccacccttacataatatgatcggttcattctctaaatcacaaattgtaagagcgtccttcttacagagaggatgatcctctcttaagatagcaaccattttccccttcgttaatggaacaatctccatatctttattaggcaaaataacaatccctatatcaataaccctcgatactaaccaatcttcaacttctttaatcgtcccttcacaaagaactacttctaagttcggatacttttccttaaaaaggtttatcattttgggtaagaaatgtgcagaagcgctcggaaaactcccaattcgaatcgtcccaacttcgtgtcctttctccatcgcaacttcttgttcaatcttcgctacaccgttcaaaatctctctaatatgtacaagaatcctatttcctacatccgtaacgagtagcccttttcgtttatcacgtataagaatcgtaactcctaactctgactcaatacttgaaatcgcatgactaacagctggctgcgtcatatttaacaccctggcagccttcgtaaaactacctaaatcaacagtttttattaatacttgcagttgtgtaatggtcataactaatcacttatactcctcataaaaaagattcattttatttattacagtcgatatcatatcatagtgaaatgaataacaacaaggaggtctttcagtgacacagctttctcgaactaagacggccatcatccttacctttctcgttttcatgtggggaatcaattggcctttatcaaagtttgccctgcattatacaccacctgttttatttgcaggcgttcgaactttaattggaggattcattttacttctgttcgcattaccgaaatacaaagagttacatttaaaaaaaacgtggcatttatacgttatttcttccttacttaacatcattatattttacggattacaaactgtcggccttcaatatatgcctgctgggttattttccgccattgtatttctacaaccagttttactcggtattttctcgtggatatggcttgaagaatcaatgtacggcttgaaaattttcgggcttgttctcggatttattggtgtaggcgttattagctcaagcagtttaacaggacatatttctgttattggaatccttctcgcgttaggatgcgctattggctgggcacttggcacagtattcattaagaagactggtcaccgtgttaatgccatttggatggtaacacttcagcttattattggtggtctttgcttaattggatttggttcagagtttgaaagctggtctagtatcgcttggagtatgccatttgttagcgtacttctctttatttcattctttgttattgcaatggggtggcttgcatacttcacacttgttggagctggtgaagcaagtaaagttggggcttatacattcctcattccactaatagctattattgtaagttcaattttcttacatgaggctattaccattagcttattcatcggactattatttattgttgtgagtatttgttttgtaaatataaaaccgaaaacacttgctgtaaggcagcaagttgaattgaaataaacgtaagaaagagcctactgttgtaggctctttcttacgtcttactttttacgacgtactacaaaaacacacgcacttaccgacgatactatggcaaaaatagataagacaattgctatcaattgcatattactagtaccttcatttttttctacactagacacttcaccatgttctcctgttaatgacgtaccttttgcaattgtagtaagtgaatgcggtttttcagctttttcatcacctgtccattcaacaatttctccatctttatattgttgatatgcgtcccaagctattttttgctctttatccggatttttagcgacgaaagtaaatcgctggaactgacctgttaaaattccttctcctgtcgcttcccatactacagttttaacttttccggcattatctttttgctcctcaactttccatcctggcactggttcatactgctggaactctactccagacggtattttcagtgtaacttttgtcgttgctacatttttttcaactggtacttttatcgtataagtctcccaagaaccaacgtcagaagttgctggttttacagtgacgtgcgcactaacaggtaacgaaaacattcccattgcaataattgttgcgatcattgttgttcctaatttttttatacgtttcattttctatttactccttttcatctataacatctgtttatcctgctactcgctagcagcatgattggtaaaattttatctgccacctacaataaatttaaaatctgtatcgaaactatcaagagattttgttaatccatgaacatgtatattccagtttcctgtcatattaatatacataccttctgcttcatattctcctggtgaaactactgaaactttaaatgaaccttttcccatgttcatatctaatgattgagtcgtcaatatcatttgttccatatcagtaacaggctgtcccttttcgtcctttagtgtaatatggaatttattttgtcctaccttattcggacttacatttagcgtaagttcatatccattatctaattgcttactctctgtaaatggtccagtaggaggcatcggtggtgtttgtacgtttgtcataaaagctacgattacgaaaatgataattccaatgacaaactctactttcaccgtagctcctaatccttgctgcgctcttattctccctttcacataatgaataattcccaatatccccatgaaaataaataatagtatctttgctaataaagccaatccatacttcgtatcaaataacgagtggattgttggaataaaaaatgtactattaaaaaggcctgttattaaaatcacaatgacagcacctgttgcccacggtgaaaaacgcttaatcatatcccaatacatatgccacttattatcctctttacataaaagaagaataatagatgataaaccaccaacccataatgaagctgctaataaatgtagaaaatccataacgacagcaatgtctttaaactttaaaccgtatgcgtgactattaaaggccttcataacaagtagccctataaacaatagtattggaatactccatactttaaacgacgaaaacttctcatgcttcaccgcaaaatacgtaacaattataagcgtactaatgagaaccatttgagtaatccatacataaccaaaaacagaaagctgtaatgtttcttttaatagtaaaggattgaatgcttctagccatgaaacatcagcatttattttcgcttgcagtggtagattgaataacaagctaatcaatatcccaaataaagagatccatattatgttcttactccttgatcgaaccgaggttgcattgcctttatacataataagattaaagaatagcactcctataaatagtgagaaacttgtatataaaattccacgttccataatcatatcgatttgtgggacgtagcccatctcttccacttgtatatcgtctgtttccgcttccgctaatccaacccggaacgggataactccttgaattggatgtccatcagctgaaatcactttccactgaatagagtaaagaccatttttgagattgtcttttaatccagcttctaatagctttttattttttttatcaatatgagcatcttttaaatcgatccttttacctgatgtatctctcacgtacaatgtattaaaacttgaaacttgtatgtcctcatcgaattcgatttttacaacagatggtgctttcttcaatgtttcattttcagtagggtttgatttcacaacgtacgcatgagcagatgcactttgcggtatcaatatgataagcacacacacaagtaatagccatgtccctaatcttctcattactttcacactcatttcacttctttcttcctcattgctctattttcattactttaacttccgaagtttaattctcgggcgaaatattaacctgattaaatataaacttctataaagtataactcttatttctcttccacctctaaacttctaatataatagtaactatcactatagatacaacttacatttttaaagccgattgttattatatcataaaatatatttatgtaagttatcaaagaagaaaagttatcgtgaatcatttgtgaaaaaaatgtgaaatacataaataaaaaggtattacgttattacgtaacacctttaaaaaaatatccctcttctatttctcttccggataatcacaatactcgataatcgttccttctgtatccgctgggttaagataaattaaccttctaccgtgcttattaatgcgtagtgtatgctctaatgtccgaataccttgttcttttaactcttctagagccacatctaaatcatcgacacgatacgcaacgtgatgaacacctttacctttttgtttaataaaacgggcaattggagatgttgtattatttgtcggtgcaagtaattcaattctatctccagccacttcaagaatggctacttcactttccacaccaggagcttcacttacgtaacgatctattaaagttcctagtaacacattttcataaaaacgtatcgtactatctatatctcgaactgcgattccgatatgatcaattgtttttttcattttatttcccctactactttattttttctcattattaatagtaacaaaaaaagctatagaaacaagtctataactttttttatttaacctattttcttatccgctctagttgctggttgaacttggtttttcacttttaaaatgctaataccatatccgataaatccaccgataatcgctgggaagatccagcctaatcctacttcctgcatcggaaggaatttagtgaacacttggcttactacttcaatgttaactccagctgcacttaatccatcaaataagctgatgataaatgttacgattaagcttacttgataaacttcagctcttcctttaaataatgaatggaagaatgttaagaaaatcaatacgattgctagtggataaattgctgttaatactggaacagaaactgcgatcaattgtgttaatcctacgtttgcaacaattgcactaaatacacatagcgtaattgcaattgctttgtaaggaacatttgggaataacttatggaagaatgaagaacatgctgatacaagtcccacactagttgttaaacaagctactgtaatcattaatcctaataatactccgccatatgatccgaaatagtagttagaaactttcgctaatacttctccgccgttctctaaatgtccaagctttgcaacacttgaagcacccatataagaaagtgctgtatagataattgctaaaatagatgctgcaataattgtcgcttttgcacaaacgaccataatttgtgttttcgttttcgcacctttttctttaatagcattgataatgataatcccgaatacaaatgatgctagcgtatccatcgttaagtatccttcttggaatcctttaaagaatgcatgtgatgtataagcttccactggtgcttgcatatctccaatcggatgtataaaagcaacgattactaaaataccgatgaaagtcaacttaattggcgttaagatttttccaacaatatcgacaattttcgcgggatttagcgaaaaaaaacaagtgatactaaagaatataattgtgaaaagaattaaaggtgtagaacctactccttctggcataaacggcttaagaccaatttcataagaaacatttcctgttcttggtattgcaaataacggaccaatcgctaagtataaaactgttgtaaacacaatcccaaacactgggtgagcacgactagctaatgactgcaaatcatctttacctgaaaaaccaaatgctagtacacctagtaatggtaatccaacaccagttactaaaaatccagcgttagcaatccatacattctctccagctgattgaccaagcatcgctggaaaaattaaatttcccgctccaaaaaatagtgcaaataacattaatccaataactactatgaacgaaaacggtactttattcgccataatataacccccattcaagtttccttatctcattttccaattttaactaattgaattttctgaatatttaatttaagtatcaactattcttgaattcattatagtttgctatataatattttgcaatactattttcgaacttttcttttattttataaatatacattttttaacatgaaaaatagactaaaaaaccaacatggtcatccatgttggtttttccatttactatcatgaattaaaattttgctgctacttttttaacgttttctagaccttcttcaacaatttgttgtgaacgatctggatattgattgtgtccttcaattacaactgtctctggatttgtaattccccagaatccaagtacagttgttacgtaattaactgccatttccataggagccatttgttctgaagagtaatctgaaccacgagcacctaacacaactactttcttaccaccaactaaaccttctgggccatttgctgtatatttaaacgtttttccagcttgagataagtatgaaatatatgtgattaatggtgctggtactgtaaagttccataatgggaatgcaaatacaaccttatcagcttctaaaaactgatttaaatattgatctactgtagcaactgccttctcctcttcagctgttaactccataccttggctacgtttatatccacctgaaatcgcgatatttccgtaataaggaagatctaatgcaaataaatctaattccgtaatttctgtatttggatttgcttctttataagtacttacaaatgtttcatacatttttgaactaactgcttgctccgctggacgatcgtttgcttttacaaataatacttttgacatttttttattcccctctacattcttattttcttcttttttaccaaataatgagctaaatagtcccattttcttcacctaatctttcttttcatattcattattcatcatcataaaaattcttattctaagaaaaagttccaatagataccttaagttacgccgttgcaactttttgttatttaattaccttatgtaagtgattgtaatatagtcacttactttagtcaagtaacttttaataaaaaataaaatctcgacttaaaaatattaagcgagatacaattgaacaccaaatacatctttattacttgtataataaacttagagaggaaaattcatatatagaaaggatttattcatgagcactatagaaaagattcaaacttttattattctttttgctgttacatgcggcatcgtactcggacaatttaatatgatacatacgtattcagacaaatttattgtccccttcttatttttcatgctatatggattattcctcagcatcccattaaaagaaataaaaaaaggatttcgcaatttaaaatttgctggaacaagtcttactattaacttcttatggacacctttactcgcttgggggttaggggcactatttctttccgatcatccagcactttgggttggatttataatgttaatggttactccatgtacagattggtacttaatctttactgaaatagcgaaaggtaatgtagcactttctactgcaattttacctgtaaatttaattttgcaagtactgctccttcccatttatttatttttatttgctggtgtcatgaaaactgtagcggtttctgttttagtagaaagtattgttatcgtaatcgtcttaccatttatacttgcacacgctacaaaattcattatgaataaaatgaaaaaagctgaacctctcgagaataaactcattccgttttttagctctgctcaaattgtatttttaagtttagcaatagtagcgatgtttgcatcacaaggtaaatatttactacaaaatatgaatgttgttttattattactcgttcctgttctattgttcttcatcatcaattttttactaggacaatttatcgggcgcatgatgcatttatcttacaaagatacagtaagtctaagcttaacaacgttagcaagaaactcacctgttgcactcgctatcgctgtaaccgcttttccagacgaacctcttatcgcacttgcactcgttattggaccattgattgagttaccggtactagcttgtgtgtcacaagttttgttgcttattaagaaaaaacggcaatacgcataataaaaaacgtcccattttgggacgttttttattatggaaaaattacatacaacacttatttcttatttatcattacaaatgaaattaccgaaactacaaacataataatacccattataaatcgatgggctctaaaaatgttatagagaattaacttttcgttacattaacagatcctttctaattaaaaatgataggaaacgtaaatataacgaaagctgcccaaagtccgtatattggcaaatacttcgtaatggcatcttgaatagctgtcggtcctgatttgttttgcaagaaacgcatataggaaaacataatccaaattagatttgcccagatcagtatatttacacctaaaacagctagtctattaggtgtagtcccgtaagatgaaagtctaaatacgatggctgacaatgcgacagtgtcaataataagcgccagaacaattaaggaaacatttatataatctgaaatgttctttttctcgtccgagtcactctcaacgatagaaaatatagtaacagccaatacaccaagcagtattccgttgaatgccattaggaaattacgatccaagaacgggtttttcccgaccaaaattatcgttataagataaataaacaatgtgaccaggacaagcggactaaagattttagatatgtatggtgtaatatttttagcaagcttaagattcattgatactaagtatgcagccacaatagcgagagccgctgctccaaataaaacaacattactaaaatagaattctcctatatctaagtcaacaaagctaaataaacgcatggtgaatattgctagtatcattccgctcactgccatgctcccgtagagaagacaatattctaaattaaatttaatataggctaatcttgtactgccttttgaatattcatttcctgtaaatgcaagccctactaagacccataaaaatataggaagatgtaaataagcaagtatggtactgtctttataatttattggcaatgtattaagatacaccccggaaactaggaataacgctataagggaataaataatactttttttcggcttattattgtaaacaaaataagcagcaataaagggaattacaccaaaagccaagtttattggagcaattgcttcctgctcaacaaagtggaaaataatcctggtgcttatgccggccaaaatagctaaaaggcccatgaataagaaacctttttgaaacaaagatgttttttctttatttactttctccttgaaatgcaacctttcataccaagcacctagaatttgagaatcagggttttggtcccatgcttgtgagaatgcttttttaaaagctttcggatcttttctatacatcttctccaactcatgggggttatccatatgtttaacaatcaaattgttaatattcatagttatacctcctctaattttaaaaataaggttgttaccttttaacaaaagcacctcactcatttattatgattttgattttaatacaaaatttatcgttttacaataaaaaattattatttaaagcatttttttatcgttaaatttcatttcaaagaaaaacaaaagagcatgacaattttatgtcatgctcttttaacaaattaattctcaaatacaaaattaatcttattatctttccactctaatttcgcatcaaacgttttctcgccctttttaaagcctttaattaaatcagtcttttcaccttttaagagctttgtcatattcttttgcgaaattgttttacttaatatcttctttgaaatggtgaaatcacattgcgttgtattatagttagaacaaccgtaaaacgttgacttatcaattacatcgccatcacattttttacagctaccaacctttttacccgttgtaaatttcgatccttttcgttcaatcgattcaacatgtagtcccgtgaaatcccacttctcagacatttccactgcgtcttcaataattttagctgatagctttttcgtctgttccataaatgtagctggtgaagctgtaccttcaccaatttccgcaagacgttgttcccatttcgcagtcatttccggtgaagctagtattttgtcaccaattgcggtaattaatacttttcctttatcagtcgcatacacttggtttttctttacatctatatatttacggtctttcagcatcgtaataatacccgcgcgggtcgcttccgtacctaaaccttctgttttcttcaataccttctctagctcttcattctctaaatacttaccggctgttttcattaacgtaataagttgtccttctgtataacgcttcggtggctgtgtttttccttctttcactttcacctttacaacttttccttcttcaccttcagctacaattggaagaatggtttcgtcatctttatcgtcttggaaaataactttacgccaaccttcttgaatttgctgttttccttttgaaatgaattcagcacgttcatctacaagcgttacaatcgttgtatagtcaaagattgcaacttcataatgagctgcaataagccttcttacgatcatatcgtatattttcttttcatcacctgatagtctgcttgggtttgtaacttgctctgtcggaataatcgcgtagtgatctgttactttcttttcatttacataacgcttattgttcataatggattcaaccggagccggtaataaacctttatattcatcaaactgacttaacttctgtaaaatatcagggaaagtcgctgcttctccttgagtaacatagttagaatctgaacgtggataagaaacaatccctttttgatagagtgcttgcgttatatcaagcgtctttttcggtgaaaacttaaaggctttatttgccgttgcttgcagtgatgataagttgaataaaagcggcggctgaaactctttacgctccgttttcatttccttcacaacagccggtttcccttggcaaaatgccgcaattttattcgccatatcagggtcttttaagcgggattcattatccttctcccatttcccgtcatatttctttccttctatattaaaggttgcaaacacttcccagaaaggctctgacttaaagttttcaatttctttctcacgctttacaatcaatgctaacgttggtgtttggacacgaccagcagaaaatacatcattcattccttttttctttaacaaaatactaaacacacgtgatgcattcatgccaacaacccagtcagcacaagatcttgtgtatgcttcgtaatacgtattaattgtatctgattcatcaagtaaatttttaaacccttgataaatagcttgcttcgttaaagacgaaatccatagacgcttcataggcttttgcacattacaaagattaataatatttcgtacgattagttccccttcacgcccagcatcgcctgcgtgaataatttctgttacctgtggattatgtaacagctgtttcacaacgttaaattgcttatactttgactttgttacttcaaattgaaaacgctctggaatcatcggtaatgtattaagtgaccattttttccactctgcgtgataatgctctggattacataactgcgtcaaatgaccaattgcccatgtacagtacgctccatttggaaataactcattcgcttctacctctaaatatccatctttccggcgatatttaaactgtgaaacaagagccaacccttgatctggtttctcggcaataattaatttcattttataactccctatctgtattccagtgttactttcattgtctatatgtttagaagcgatgataaaacaacaatcttatttatcattcgcggtttgtctcgcaaatgggagacctataatattatacgcttattctttatggcttcacaatagaaactcataatataacaatttctttcacatgcttacaattaaaaaagacgccctaaaaaatcaagcgttcctttgcttacatctatgaaattgtgcagataatatgcagatataaattatcataagtacacatatgatgaaatgaacgataggacaaggaggtatcataatgtttgcttatacgttaactaccttaacactttgctgtacctcaattcttattgtatccaatatttctaaacgtaaggttaccctaatggagtatatggtatttattatgtcttttagtatgagtatcggtttaagtattggtttttatttaggcattctctttaagggggaattactatattctactttacttgctattttaattagtggttttatcggttttttagtgggtctacgttttcacctatatactgctttagaaggaatgttctctggattaatggcaagtatgatgggagcaatgattacagaaatgttaaacgctcaacaagctcatagtatattgttcattagccttttacttactataacgattactatgtcctgtgtgattcaattgttatcggagaacttttctacttttatccaacgtcgttttttgttattcctttcaattagtgtagtaattatcgttgccgtattcgcgacattcccagatcatactcctgcaccttcaccttcacctgggcataatcaacatatacattagtacttgcaacaaaaatgaataagcagctatccataggataactgcttcctattattctggcttattaggaatgttttggtttggaacatagtcagatttataatctgtatagttcacttccgttaccatccctgctgaagcatgatgtaggtcgtgacagtggaacatccactcaccgggattgtctgctacaaaggctacttcatattcttctcctggttttaagttcaatgtatcttttacaattggagaaccttctatcggttttccatctttactcaacacctggaagaagtgaccatgtaaatgcattgggtgatcatccattttagaacgatttaccaatttcacttttactaaatcaccctttttcacttgaattgggtcaatatccggaaatacctttccgttaattgtatataccatttcattttcattcatttgcgtatttaagtccatattatatgtggcagtatactcttgatttaacgtgaaactacctaattttttagcaccatatttcgtcatatctaatttcgctaattttcccttttcatctgctttatctttcatctctttgctgccatcatactcaataacagctttcattccttttgcacctttattttttgaatggtcctcaacataccacttcccaggattattagcagtaaattcaatatcataacgttcacccggtgcgattgaaattactttatcctttataacttttggatcgtttattggttgaccatctgtcgcaattacttttatatcatgaccgtgaacatgtatatcatgtgatagataaccagcattaacaagtcgaagacgaactttatctcccttattcactttcaatggcactactaaatcaccgctttttccattgattgtgaataaatcatacatactcatatcatgaccttccatcttcatatttccatggtccattcctgccatattgccagagtctttttgatcactgcccatgtccataccagaatgatccatgccgttcttatcatcattctttttcgtattttcatcacctttagatttattacctatttgcccttttgtcatttcttttaactgctttttaatttcttctttatctgtaacccattcatccaacagtaatgtgtaatctttatcatatttttcctttgtatcctctacaatgagcgctccatacaaacctctatctaattgatttacagaatcttgatgcgagtgataccagtacgttcctggtacgttcgcttcaaattcgtaagtgaaactttttcctggttcaactgcatcttgtgtcacgcccggaattccatccatgttatttgggacaggatatccatgccaatgaatagatactggtgcagataattcattttttaatgtcactttcaccttttcaccttttttcacccgaatttctggaccaggagatgagccattaaatgtccagactggaacaataacaccgttacttaatttttgcttttcttctttcgctattaaagtaacttctggccctttttcaaccttcaatggtgttgtagctgtttcagtctgtagtgttttgttatcattcatatttttatgatcatttgttgtatttgtcgtcacagaacaggcagcaattaaaaatattacagagacagtaacggctgctaatacaaatcgcttcatggacaatccctccttattctttttcaaaatcattatagaagttgattttcaagaaaataaggagatgtaattagatcttacgtaagctaattggaaaattactaaaagcggagacattacaagagacgaatattttagtaatacaaaatgctttccttgtagcgactatattagccgttctcgtatttgttttgacgttatttcttaagaaacaataacactgctattattaaataagaaaaatgtagctaaaatgctcttcacaaaagaacttagatttttgtataataagaactaatgttcctcacagacaatggactcaaattacacaaatatatcaaatagaagaggattgatatacgatgaaaattgatagaccaaaaatttcaccagagttatcttcaaagaattttcaagatattttttatgaagaagatccaacattggaagtgtgtgaaattatagactccactttcgaaaatgaatctgtagatagagtgcggttatatgatgcggtgataaaaaactgtaagtttactaatacagactttagcaatattgatattacagatgtttgttttgaaaactgtgatttatcaaatgttaatttaagcaattcttctgttcacagagtcgaatttaaaaacagtaaattaatcggagtaaatttcacaggatctagcttaggaaatgttaaatttgagaattcaattttgaatttagcggcatttggaaattctaaactagaaaaaatcatcttcaatgaaacttcattaaataatgcagatttttttgactgtaaacttaaaaaagttgaattccaattatgtagtcttgatgaagctaattttgatcagacatcactgaaggggatagatattagttcttctacctttgatacacttacagtttcagtgaacgatttaagaggatgtaaagtatcgacatatcaagctgttcagtttgctactttattaggattaataattaaagattagtatttcgaagaaaagaaccctatcccgaatcatggattttttaattgtccacgattcgagataaagttcaaataaattagtgatgactcttttattatttaactacagcttggtttccttttacatgttcattatttacactcataaattcttcaatttcttcaacttccctaatgatatcttttgacaagttttcatacccgtctttcgttacaagaatgtcatcttcaatacgaattccaattgattctccttcaatataaagaccaggttcaattgttataaccataccttcttctaacactctatctttatatgttcctacatcatgtgtatctaaaccaaggaaatggctgacaccatgataatagtattttgataactcttcatcttcttgaattaaaccaattgctttacactcttctgccagtaccttttttgtatgctcatttaatgcagcgaactttaatcctggcttaataatctctgttgtttcttttaatgcttttaatacaatattataaatttgtttttggcgactagagaatgttccatttgctgggaatgtataactaatatcagcgttatagtagtctttttgagcacctaaatctagtaatactaagtcaccattttgaatttgtgcatcattatcttcataatgaagaactgtagcatttttcccactcgccaaaattgtattgaacgcatggtacttaattccagatgacttcagtgtaaaatcaaattgtgcttctaattcatactccatcatgcctgcttttgcatgcttaagtacgttgtaaataccgtctttcgttatagcaatcgcttctttaataatttcaatttcttcctctgttttaaatactcgtaattcacaaatgttcggatatacattaccaattgttacgtgtgggtatttttctcttacatgtttagcaaatgctaatgtttttgtctccgtaccattccaatcacgacgttctatatctaaatatagatgcttcgcattttctgtaaaaagtatatttgacattgtcttttcaaagctatctaaatatataactttctttatacctgaaattttctctgcttcttcgttagaaactgttttaccgacccatttttccattactggatctgccttttcaatgaaaagtgtttcttcaacactacttccaacctttttcagcataaaaataacatttggttcatcgattcccgttaagtagtaaaaattacgattcggtacaaatttataatgtgcatcagctgacatatgcggtgcttgtcccgcaaataaaatcgtaatagatccctctggtaatgtgtttgctaatcgttctctattttgagcaaaaaatgttgatttcatgataatccccctagcgttttatgtataattgtgaaactaattattcaatacacttcattctattattgttataatttttcgtcaatttttaactaaattttagatagtattgacacaggcaactaaacaagttacaataactataaattagtaagttgctaatttaaatttaaataagaggtgaacaaaatgcaaaacattttattccgtattaacgaattgtcaaaaaaagaaaaagcgaatggattaacagttgatgaaaaacaagaacaacaaatgttgcgccaaaactatacacaaacatttcgtggaagcttagattccattttattaaacacaaaaattgttgatcaaaatggtcttaacgttacacctgctgcattacaagatgctcaaatacgtttaaaattaagcaaatgagttccgagctaaagaattctaataaaacataaaaagagctggatttcctatatagaaattccagctctttttattttcttttttaatttagtaaacgagcgatacatcgcaattctccacgacacaatcatcgcaaatgcaagtaagaaaaacattccacttaactccgctaaatcaatcgattgacttaaatatgatttcaacgctactcgtacagctaataatccgactaaaataaatataaatgcttttgacggtttcatatatatttgttcgtctcttatttcaaacttcgttgtttttataagaaatacagagaaaataagccctgcaataattgcttctattatttctaacgacgttaatcggaattccggtaaaaagtacatcattgctccagtactcataaaaattggcggcaatataattttctttttcgttaccggttttttcgctgctttaaagcgcagaaacatgacaccaacagccatacaaaccgctaaaatacttgataaaagtgctatcatactcttcccactcctatctatttaaaagactttttgagcaaaatcataaaccaaacgagcccgatacttataataacatgacctaatccagccatatggcttaaaccgtaaaagtcagttccatttacttgtagaagacctctccatagcattgtaacaatagtaaagattactcctacattataaacaacaaaccatgcacaaaagctctttgtttcttgtacatgaaacactttacataaagctaaagcaattaaaaagaatacaaaaccgagcactaatacatgtgtatgcactaattgcaacattgtggatcctttaattccttgtgctttcgaatactctcttgcaaatacacctgataataaaccaataattaagtaaataaatgccgcattatataatttcttcattctattcctcctgttgtaaactttctatattcgctgcaattattttaagcaaagtttatgaacggagtatgaacaaaatattacattcaatttttgaaaataaaaaagccattccacaaataataattgtagaatggcttttcaatttattttaaatcttctattgagaaagcacctggcagtaactgctcaacagtcacttctttttcatcaccttttacattcgttaataatacaggcattttcgggtcacagaattcagcaattacttgtctacacgcaccacatggtgaaatcggtccatcagtttctcctgtaataactaagtaactaaaatcgcgctcaccttctgatactgctttaaatattgctgttctttctgcacagttacataaaccgtaagaagcattttctatattacaaccagtatagattttcccttctttcgtaactaacgctgcgccaacaggaaatttagaatacggaatatacgctttcgataacatcttgtttgcttcttcaatatattttttcttacccatattatttccccctcaaagtaaacgaaatgatgattagtcagtaataactgtatgaactaatttaggagccactgctgtttcagcgatagagatgttctcataaatttttgcttttacatcttctacattttcacgatttgcgtagattgttacgaatggctcgccttcttttactgcatcgccaacttttttacgtaacattaatcctactgctaaatcgatttcatcttccttcgttgcacgacctgcaccaagtaacatagctgcaataccaatctcatctgcaacaatgttagaaataacacctgaagtttttgcaggtacatcaattacatacttcgcctgtggcattttttctggattgtctacaattgagctatctccgccttgattgcttaagaactctttaaacttctcagttgcttttccgtttttcataacttcaattagcatttcacgagcttcttctaacgtatttgcttttttcgcaagtacgaccatttggctacctaatacaagtactaattctgttaaatcttctggaccttcaccttttaacgtatcaatcgcttcttttacttctagagcgttaccaatcgcaaaaccaagcggttgtgacatgtctgaaataacagccatagtttgacgtcctacattatttccgatacgtaccattgcatgtgctaattcttttgcatcttcttctgttttcataaatgcaccagcacctgtttttacatcaagtacgattgcgtcagcacctgctgcaatttttttactcataattgaacttgcgattaaaggaattgagttaaccgttcctgttacatcgcgtaatgcataaatctttttatctgcaggtgttaagtttcctgtttgtccaataacagctactttgtcacggtttacaatatcaatgaactgctctttcgtaatttcaacgtggaatccttctaccgcttctaatttatcaattgttccgcctgtatgtcctaaaccacgaccagacatttttgctactggtacatctaaagcagcaactaatggtcctaatactaaagttgttgtatcaccaacaccgccagttgaatgtttgtctactttaattccttcaattgctgataagtcgatcgtttcaccagactcaaccatcgccatcgttaaatctgcacgttcgcgatctgtcatatctttaaagaagattgccattgcaagcgcactcacttgataatcaggaatacttccgtctgtatatccattaataaagaatttgatttcttcagtcgttaattctttgccgtcacgtttttttgcaataatatctaccattctcattacaatcaccattcctttttatatgatacgaatctattaaaataataagccaacgattgttgctgataagaaacttactaatgttgcaccgaatagtaatttcaaaccaaatcttgcgactacattcccttgcttttcatttaagctcttaaccgcccctgcaataatcccaattgaagagaagtttgcaaatgaaactaagaatacagatataatcgctgtcgttctatctgagaaattaaagtttccttgtgctaaatctgtcatagcgacaaattcattcgatactaattttgttgccataatatttccggcattaactgcttcatgccaaggtacacccataataaatgcaaatggtgcaaatacataaccaagaatttcttggaatgaaataccgattacacctttaaatactgcattaatgaatgcgataagagcaacgaaaccgactaacatagctgctactgtaatcgcaactttaaatccatcaataatgtattcccctaatacttcaaagaaagtctttttctcttcttcttgtacttctaacatatcttcttcctcagtaacttcatacgggttaatgatagaagcaatgatgaagccaccgaataagttaagcactaaagcggttacaacatattgcggttttaataacaccatatatgatccgacgatagacattgaaacggtagacattgcagatgcacataatgtatacattcttttctctggcaataaccctaattgtttcttaactgaaataaacacttcagattgtcctaaaatcgcagaagcaactgcattatatgattctagtttccccattccatttactttacttaatgctagaccgatagatttcacaataataggtaatactttaatgtgttgcaaaatacctattaaagctgatataaatacgattggcattaatacacttaaaaagaacgaaaactctttttgatttactaatccaccaaatacgaaattcacaccatcagcggcatattttaataactctccaaaaccatctgctattccgctaattaatatattccctacacttgtatttaataataaaaaccccaaaataaattgtaatataaccatcgttatgattgggcgatatttgactttctttctattattactagcaagccaagcgatacctaaaatcaatacgaggccaaaaataccaattaagtatttcataagccgtctcctcccattcgtatccgcttacatttttttcaattattaaagcaatagatacactttactttgtgtatctattgctcttcacttcattaatgattagtagttatctgtagcaccttttgcatcatttaatacgattgcaacactagcacttgctccaacgcgagaagctccagcagctaccattttgtctgcatcttcacgtgtacgaacaccgccagatgcttttacaccaacgtttggtcctactgttttacgcattaatgcgatatcttcagcagttgctccgccagttgagaatccagttgaagtttttacgaagtcagcaccagcttttactgataattcacaagcgcgtactttctcttcatctgttaataggcaagtttcaatgattacttttacaagagcttttccttttgctgcttgtactacttcataaatgtctttttcaacaagttcgttgtcaccatcttttaaagcgcctacgttgattaccatatcaacttcagttgcaccttttgcaatagcatcttttgtttcaaatgcttttgtttcagtcgtgcttgctcctaatgggaaaccgattacagtacaaacgtctacatcatgtccagctagttcatcagccgctaattttacccatgttgggttaatacaaacagaagcgaatttatattcctttgcttcttcgattactttcataacatcttctttagtagtattagcttttaaaattgtatggtcaattaactttgcaatgttcattatcttcactcctcatatcttttaacaacttcattctaactcttagttgaacaaatgtaaatacacttttgaaattttgttcattctttttaaaaggaatcatcttgtagtaaataaagcgcattctaacaaagaacatttcagatatataatcaaaatttttatgttaacaatggtagtatgtatctccatatccataattatttttaaaaaggcaatttgtgttcaaaaaaactcctatcattcatacataacaaaataaaaggcattctcaaaattaacatcttgagaacgccttttatttctaatctttttgataatgtaataattctttcgctgtatgctgatcgataattaatacatttgcatacccgccacgtaacgcaccatcaattgcttttatttttctattaccacctgcaactaaaatagagcgtttctttaatttcagttcctctaactcaattccaattgtacgctgattaatctcttcgctactaatatttccgtctccatcaaagaaacgtgaacaaatgtcaccgaccgattgttttttgagtaaacttgtttcatccttatcgaaataacctaatcggaataatagcgcttcgtctcgcactgttcctacagtgaaaactgcaatattcgcttgtttccccatttcaataatgtgatgaatatgtcgatcctgctctactaattcttttgtcactgcattatcaaatataactggaagaggtagatttcttggcgtcgtttgaaaagcatctgcaaataaagctatcgtctcattcgcatatgtatttacacttgaatgactaataccaccttttagctggacaacctccaccccttttacatgttgcggtacgatttttctagcgatttcatacatagtcatgccccagcttacaccaacaatatcaccgtttttaaccgtcttttccatatactcagcagcatatttacttatatactctgtaatcgttgcatattccggcactggagaaaatacaacatgtgcctctaacaagttgtacttttctttcagtaaattcccgacgttatctaaatcagcaaatggatcggcgatgctaatttgaacaaaccctttttctttcgcgtactttaacaatctagaaatcgtcggtcttgaaatatttaatttgttagcaatttcttgctgactataatctgattgataatataatcttgcaacttcaacgcttaattgttgtttatctttttccatagtaactcattacaaatcccttcctgtatttccctttcgttacaagcattatacagctttatgcaaaaaaattcgactaccgaattttatctatctgaacttctactacacttaatatataatgaaaacttattgtgtagatttacaaactcaatatagatacgcttgaaacatgtaaatcaattaacatttaattcacattttttctgtagtaacgataacaaagccgttcaataagaaacatgaaacatcatctaaaaactattcaaataccccttataaacagaagttactatttataaggggtatttactcaatttaattttataaaaattggatggaaacaatgcaagttctcacttatttagaataagtgaaaagatgatgttttatttgttcaataaaataatgatggtgtatattatcgttagatactcgacttgccataatagccccctccattgaagaggcaagaaaggaagcgagtgatataacctctatatcttctttaaattcttgtttctctattccttcttttatgagagaagccattaacattactgtatcatcataaccttttgctgctgctttttgtaattctggaaatactccagtactttcaatggcactattaagtaatggacagcctccagcaataggaggattattagctgcatcttgatatacaaggaaaattgcaaggattttatcaattgctgtctttttattttccattgctttatgaaaatgactccacataatctcaccacttttgtcgtaggcagcaaggacaatttcttctttacttttgaatctacgataaatagatcctttaggtagttcagtagctgtcattatatcctggatggatgtgcgagttatcccattagtattaaataaatataaagatgtttcaataattttttctttaaccttatcaactttagtcatgctttgtaatcctcctaatgaaaaccatcctaatattctaggtaatgtttaccctctattttcttaatttttttgtaagtataaataagtttggaacagaaatatcttatcaatccctatcttatggaaacctcaaacaatacagtttgaaaagaagttaatcaaattgtattacctacataaattaagtgaattttccgtcaaaacaacatgaccaattgtttaattcagtcatattatacaactaattttatctaaaatcgtagaggtgtaaaaatatatagttaattttaatgtatagacatatgattattatatataatttttatcaatatgtttagctaaagtgtttgaactactcccactttcacttcattctataaaagattaaccattaatgattactggaattaaattgtaacaaagcaactgaaatataaatatatttgcttttttccattttgattttgttaatactttataaaaagggtttaaaaaactagaaacttgtagtatcattagatttcgattcagaccgaaccgtccggtttataatcttatataaatatatttagaaggagagcgttatgcagaaagaaaaatcaaaaattataggtaatttaattatgggggcaatacagtgaactttataaaaatgaataaaaaagaaatcattatgctaataatctttacactgtttgtaccatttcaaattggcttgtacatactatttggcatatcacttttagctaatgtcaatttagttgaatcagaatttgttcttagtgccatcggttttactgtacctgctattgtaggaatcatttactttaggaaagaaattattgaaagttttacttattttaaagagaagacaattttgaaaatagtaagtattcctatggtagttttatttacgttaattgtggaacagtgtgttatgcattttctagcaactggtcaaccagagaaccaagagcagctccttgaaacgggtgcagaggtacctcttgtatttacattgcttgtatttggtattctgggtccaatacttgaagaaattgtgtttcgccacatattaataaatcgtttttcttaccatattggtactgctattgcatctatcatttcgattatgatttttacacttcttcatacgaaccaactttcggatattgctatttatttacctggatcgttgatacttactgcggcttatcttatttctaaaagatccattgcatatgttatagcgatacatatgttaaacaattgccttgctttcattctgtaagaaactagacttgtttctgatgccaaaaatattctatgtttctatcaagcatttttggtaccagaactactttttctatgacataagaaagctaatcaaaaattataaaatattaggagagtgtcagtcatgattgtaacaacaacttctggaattcaaggtaaagagattattgagtatattgatattgtaaatggtgaagctattatgggtgcaaatattgtccgcgatgtattcgcttccgttcgtgatgttgtcggtggccgtgttggtgcttatgaaagtaaactaaaagacgctcgtgatattgcaatgggcgaaatgaaagaacttgcaaaagaaaagggtgcgaacgctatcgttggtattgacgtagattacgaagttgttcgtgatggaatgttaatggttgctgtcagtggtacagctgtacgtatataagtaaataaaaaaacggttcctcttggaatttatactttgaggggaaatcctgattctgttgcagattttaaagaataaaacgagaaataatcaacttttttatttctcgttttatctacatatttatttttggaaaaacaatctaactccaaatactaataatacggcgcctgtaataccctctattgtacggttcactctttcttttcttaaaaaagttcttaattgacgtatgagtgagatgtaaagtaaataccatattgctgtcaaagtcgtaaatgtgagtcctaacaaaagaaattggaagaaatgattttgattactcacaataaattggggtaaaaaactaaggaaaaatacagcggtttttggatttaaaattgccgtagtaaatccttgtctaaagcttttaattgccccaatatccttagagtccatttctgctgaacctgacatatcttcttttttatgtaaggcacttttaattgactttacagctaaataaattaaataaacagccccagcatattttataaatgtaaataacatagcaaatttcattaagatagcagaaagtcctaacgtagccattattgtatgaatcatcattccagatatcgttcctaaaacagtctttatcccgccatttttaccatgcgagatagtattttttgtaactagtgcaaaaccaggaccaggcatcattatgattaacattgctgtaaggataaataatagataattttccatgttgtagtatttcctctccaatttttagttttgcttacagtatagcttttttcattaaaacattacatataaaagacttgatcagaaatgtatttaggttattcgtatcaatttgattaactattacccaatagccacattgataaaacacatgacaaacttatatataattgcaagctcaactctcacaaaaaaacaggatgaaaaataaacagcagaactagtccactgtttactttgccacaccttcatgtaatttttctgtataatcttttacatctttccagctatctttcgctgtatgtaaatcttcttttataaacgtaaactcttccggactaattccttttacgttttgtaataaattattatactttgcacctactgtataccattgatttgatatgttttgtagtgctgtaattgctgcatcaattgtttctgtcatgtttgttgttttattttttacatcagtcaaaattacgacttctgcttgtgctcctgaaattctatcttttaaattggcgatttctctttctgcatttgcgatatcttttttcgcaaccgcaatcatcggcccgccagcaagacatgttattagagctacgcaaagtacgccaccagcaatgaccatatcattactctttttaatcgaatcgttatatgtatttatttgttgctctagagctggaataccagcattcgtacttgccaatatcgctgttaactgatttgtatcctctttgaaactatttgtatctttcgccattctatcgcgaaaagctttcaaatttcctaataatccatctacctcattttgattctttacaatatccgcatacaacttttctaaatccgcttttaattttccactatccttttgatcaatcgctattaacatgtcattataatacgattgaaaagtattattgtaatttataatattttgatctgttttcataatttgaggcttcatattatttaaccaatatgctgcattaatttttgcatctctttgatgctgaatcatactccctttaaattcactattaatcgaacttattttacttaaatccgtctcttgttgattttgaattaattttgcatatgaatccattgcaaatatgcttgatgtcgtttgtgccattacatcttggaatcctgctggtccaagagaatagtttttcacattttcttgtagcaccgttacattttgttctgctgcaaaaggatgtaaaggaaatgcgttactcgttgccaccccagcaatcattaccgctaaaagacattttttataaaatcgtttctgcatatttttcacctattctctttataaggatatcaaaagctcctgctcacaactgaacaggagcttcaaatcattcatcaacacttaacgccctaacgattcgtattcgattatgcttttttcgtatctactactttaatatcttcagcataaatcttttctgcatagtctttaatgtttttccagctatctttcgcaatgtttaaatcttctttaatgaaaacaagatcgtttggactaattgaatccacattttgaagtaaagaattgtattttgatcccattgtataccattggtttgaaatgttttgcaacgctgtaattgcagtatcaatcgtatttgttaaatactcagtttgtgttttaatgttcgttaacccagctacttctaattgagcagttgtaatttgtccagttattttttgaatttcagcttgtgcattgtcaagttctttcttcgctaatacgataccagctgtaccaccgcctacagctgctgcaccacctgcaattaatgcgactcctagcggtgttcctgcgcccgtagcaataactactgcaccaccaataattgcaattggtcctagagctgtcgcaacagatgaaccgataataattgcattatatttactaattgcttcattgtacgttgtaatttgattttgcagaagtggaatccctgcatcttgactagctaatatagatgtaatttgatttgcatcacccttgaagttttgcgtatccgacgtcattttatttcggaattttttcaagtcttctactaactgatccacttgcgctttattttcattaatactacttgataatctagttaggcctttcgtaagagtcgctttatcttttgcatctaccgcagcaactaaagtatcataatagttttggaattttgtattgtagttaatgatgttttgattcgttgaaataagctgtggctttaatacatctaaccattgcttcgcatttcctctagctgtatcttggtgctgaatcacttttccttttaaagctgcatcaacagtcgatacatttccaaagttaacattaccttgtttaataattgttaaagcatacagatccattactaaagcatttgaacctgttctttccattgcatctttcaaaccttctggtcctaatgaatattcttcatagttattataagcttttgctaccgcatgaactggagcttgtttcactgtactttcagctgcatacgtatgagccggcataatatttcctgctgcaaatactgccataagtgctgatagagccattactttatatggtttttttgtcatttttcttctctccctatatcgctaattatttttctatttaatgtacttcaacgtttgtaacgtaatcttcaaattgatttgtttgcttattcatttcatcacttacttttttaatttgattaaaatgtttttgaagtaaactactgtctgtatacgtgccttcttcaacatttgtttgaatttgaatcatattattatttaaaactttccaatccgttaataacgtttctaaagttgtaatttgacgatcaattaattctgtaaagctatttacttgatcttcaacgaatgtaatttgagtcgcctctgcttcagtttgtgataacttttgaataagtggcaataactctttttgcttttgctgaatgcgaaaagctgcttctctcgtttgactatctgcagcatttacaatttcattacttaaagtaccgatagaaacaaaatcgattgttttcgtttgtgcagtttgatttgtgattgtaaatacttgtttaccgatattaatagaacctttaattatttcttgaggtctattcaaaatagtagttagttcagcttgaatttccccttgaattcttttaatatcttctcttaatttcacaatatctccacttgatccttgcagtgtttttattgcttcatcggctttaattgataagttgttactatctttgtctaatactgttttaaatcgatttaactctaataaatcttgctccatactctcttggatgctctgtacttgcaattgtaattttccatatgcactcataaaatctgtttttgcttgctgatcttcatttacatttcctgctagttcatagagcttactataataactattgaatctagtgctgtatctcatcatctcttgatttaagtcaattagcttcggattatattcatcaatccactctcgtacattcgcctttgcaaacttttgatgattcgttaagctactcatcgcatttaccttaatgtctggctgttgcaaaataattaatccgtatgcttgaataagcggtgattgtgatcctaacattctaattgaattggataatgtatttggagcaattacattttgcgcatatactgttttcacttccgtttgcccctccttagcgtaagcgcttacaggaatgaagcaactcgtagataccgctgtaaccaataaccctgtaattaaagtctttttcactttaactcctcctatgtattagcaactattactatcgcattttattattctattttcttgcccataatttgagatggttaaaatagagaacgttctcaacgtgatctatgtatgaaccacctctctcgtattgctacagtacttacttatcgtcacaaaacatttcattatttttcatatgtgtttagtatgaataatattgtataaattttctatttcatcgaaattcccacattcacacagtgaatatattacataaaaatattattcattttaaactaaacaacatacgtaaatatgaaatttcattttgttttcatataagttttgtactgtaaggtcatttaaacacagctgtttatatatcgtaaagaagtattttcattccctttattttcaagctttcatgtccttatttcaaaatataatccgattcactttatcgattgaaatatctacatatcacaacagaaaacactactttcaaataaccaatgaagttatattagtataatttttaaccccatatgcaattatgcatagcatatacacaaaaaggatagcttcattttcgcgaagctatccttaaaaaattttcttattttttcaaatgatatggaactgtcgtaataacaacatttcttttataaagtaaatacgcacgtataagtaaactggattgattatgaagaatgttatgccaaccttttttcggaatgaactgtggtataacgaccgtaacacggtaattcgattcacttgccttatattgcactgtatcgataaacttcgttagcggctgaataatacttctataatgagaatgtaatgtaacaagccttacttcaggttgccacttcttccatttctcctcaaatttcttttcctcttctctgtcaaaagcaacatatactgcgataacttgatctgccgaaagcgatttcgcatagttcaatgaattttctactacatgcgtcatacctgctacaggaacgacaattacattcccctcaattggaataagaggctcgcaagtttttaaacttaattgatcacccactgcatcataatgcttcttaattcgatggaataagaagataataactggtaagaaaataagaatcgaccaaacttgtgcaaatttagttaaaaagaacatgctcattacgataaaactaataactgcaccaattaaattaaccgttaatcttaaagcccatccttcaggcttttcgcgaagccattttaataccatccctgtttgagaaagtgtaaatggaataaatacacctactgcatatagtggaattaaatgttctgtttgcccttggaaagctacaattaaaataatcgaagcaactccaagtataataataccgtttgagtaacctaggcggtctcctctaatcgtaaacattctcggtatgaatttatcttttgcaaggttaaccgctaataaaggaaatgcagaataacctgtattagcagcaagaattaatattaaagctgttgtaccttgtatgaaatagtacatgaaattacgtccaaatgtttgttcagcaatttgagaaacaactgttacttctttactcggagtcactccgtaataataagctaaaaatacaattcctgaaaataacacagcaagtaatgcacccattgcaagcaatgtttttgcagcattgtttggcgcaggatctttaaagttcggaattgcatttgaaattgcttcaacacctgttaaagcagaactacctgatgcaaatgctcttagtaataaaaataaactaatccctgcaactggtgtaccaattggcgcatgtaaagtgggtgaaacatgaccagttaaaatattatatatgcccacaccaattaatataaatagtgctaaaacgaataaataaacaggatatgctaaaacggaagctgattccgttactccccttaaatttaatatcgtaattaatataacaaatataaccgcaataattacgttgtgtgcatgtaagctaggaaacgcagacgtaattgcatctgtaccagcagacacacttaccgcaacagttaaaatatagtcaactaataaagatcctccagcaattaagcctggattcatccctaaattttcttttgatacaacatacgctcccccgccatgcggataagcaaaaataatttgacgataagataaaataagggctgtcaataatactaataccccaacagcgatcggaatggaataccaataagcgatcgctccaacacctgctaaagcaattaaaatttgctctggaccgtaagcaactgatgacaatgcgtcagaagataaaatagctaaagctttcgttttattaagcttttgttctccaagctccgttgattttaacggtcttccaattaaaaatcttttaatagatgaaaccaatgctgtccactctccaataattttgtacgaacttttctgcttgttgcagccagtaaactatttactcagaaaacaaaaaatgtctacaagccatagcgaaatagacttgtagacattattttttttgtcgcacaagctccaccttccttctcaatataacgcttacgaggttagctgtcggattcgggcctatgagtagccctaccttttttaaggattcaccccatcggattatgtactaatccgtaaaaacgggtcccccgtaccatgcggtttcagcgatttagaaaattgaaactgtggattataatactcctttattttcaaaaagtaaacaaaaatttttaataagaaaaaaattaaaatgattgtgcataatccactgagaaatatacataatgaatactaaaaaatccgcaaaggagacccctatgtctaaagaaaagaagcctattttttccgattcatatttagatgcagtagcaaatgaaattaatcagttatatggtaaacgtgaacaggaaataaatttgacagatagaacgaaaagaaataaataatttgtcatacaaaaaaataaaaaagatagcaatacacttatatattgctatcttttttattttttcatacatctaattctattacagatctgttaaaggtcatctcttcatacacctttaaattttgatatatagtgcctaataatggtgccgctatagaaaattgctctgctacatccagtaaatatccttgcaagtgcttcccttcaataaacgaacccttctccatatcacgttgcatcgatgacttcatatcatacgaaattttatcaattgttttcatatgttcctgggcaatattaacctttattggagctcctaatactttcataatttgtacagattcctcaaatacattacggataaaatcacggccgccttcactttcacgaattggtccaattggtgcacgcattaacgttgtcacaccggacattacagtaataaataaatatttatgccacatatcttgcgtaatattttcacttaaaacaaaactagatttcgtacctgcaaatgctttagaaatatgctttactctctctgaattttgagacttaatttctccaaacacaagtctgttggcagcgctagtttgtacaatttctccttgatcgtttaacgtcgtctcgataaagcataaaccgccaagtactttttcttcgccgaattctttttgtaatagcgataaatgagcgataccatttaacaatggaatgattacagtattttcgccaacaaacggcttcaaatcttgaattgcctcgtttaagtgatacgcttttgttgaaaataaaatgacatcaaatggagaagttctctcttctttcgttattaaattcggttggaaagagaaatccccgttaacacttcggattacaagtcctctttcctctaattgttttttccgtttactacgaacaagaaatgtaacatcttctcccttttcgactaatctgccaccaaaaaatcctccgactccaccagcgcctaatactaaaatccgcatacagcatcccccttttcaaaatacaattttataacttttagtatacataacattatacatgtcctctgctaaataagctgaattttcactctcaatcgagtataaaacagtggttattttcaaataaatttgggcatgttgtttctatagcatatatggaaaggaaacaatgtagatggaggcaatacaagcaattgaggaaaaagatgtagcaacagctatatttcaatttatattcccgttttcgtttaaagctggatatgaacaaaatatgttccctttcttacaaaaaaacgatttccgtccttttcggctcgatcatctctatgatgaaaatacatattatggggagtttaaagtttcacatcaaaatatggaagcatactatctttcatttacaaataaaattctctttcctcactcagagcatcaaaagggcttgcaacgttattcaaaggaccttaacttaactggacatttaacaacaaaccttatttcaatcccattcaagatacactctattgatgtaacactttgtccttatgaacttggcttcttaacaattcgaacagaagtaaacactgctccaagcatgactttatctgaagcaatcgaattcgctgctcgcttccgtgtacttgaaactaaaaatgatacaaatgagactatttgtattggatgtaacggaaaaaagtattcccaagttgaaaaattcatttttggttatttatttcatggcgtaactgatttctttgaaaagaagagattaagaagttcatactttcaaaccttccctttcttcgaagaccaaagaatgtacgtccaaactttattgtcactaaaagaaggtatggaacttaatgaagtggatgtttatcgtacttctagtctttccggattaacaagtgatggtaagccatatgtgagtgcaaataaccttccttacattcatgactatttaaaaaaacacgcttaccagagatgggctccaaatcgttatttcataatggaagaacatatttttacatgtgtaacaaatgaaggagaacgcgaaatcgctaaacttgctagtcaaatgtacggagaattttattacgctttattattaaacctattccataaaattgttttattaaaaatggcaaacgcctatgctgagctaaacattgaacaagatactaatgaaatagagaaattaatttattcgatcaattcgttcactgctaattatttttctttagaattagtatcccaatcacaaagtgaagatattttctttcgtttaagaaaactttttaatattgaggttctatactcgaacgcgaaacaaaatcttgatagtttgtttaaatatcaagaaaatgtcgcctctaaaaaagatagcctcttattattaattttaacgctctactctgtagtgggccaaatgttagggtttactatgattgaccttttaagaaacaccgattcaaacaaaatatcgtcacctcttgaatttttcgctctattaattgcgattagcggcattgtcatttcacttattttaggagctcaaagtttataccaatggggtttacagcataaacgaagaaaagcttgggtaaaacaaactgtactttctgccgttaaagagaaagaagataaaaattaaagaaggttattttcaaattcttggcgcgctgcagtaagtgaaatctttatcagcgattttccgattatatcggcgcaactcgaaatatatcagcgatttttaagatatatcagcgcaactcaaaatatatcagcgatttttaagatatatcagcgcaactcaaaatatatcagcgatttttttaatatatcgacttaccgacaaaaaccgacaaatgacagaaccgtataataaaaaaagggtgctccaaaattaaacttggagtaccccttttactataagaattcagtttacttccctgcttcgatttgctctaatgcagcagctacttgctcttccgttaattcatgttgtattacgtagcggttacgtggacttacacgacattcattagaacatgcacgtaaatatttcgcttcgttttcttcagaacataaaattttcttattacattctggatttgaacagtttacatagcgctcacaaggttcacctgtaaagtggtctttaccaacgataacatgttctttttggtttactggtacagcgatacgctcatcgaacacgtaacattgtccatcccaaagctcaccttgtacttctgggtcttttccgtacgttacaattccgccgtgaagctgacttacatcttcatagccttcacgaactaaccaaccagaaaacttctcacaacgaattccgcctgtacaataagttaaaatctttttaccttcaagtacttctttgttttcacgaatccaatctggtaattcacggaaggattcgatatcaggtttaatcgcacctttgaagtgacctaaatcaaattcataatcatttcgtgcatcaatgataactgtatcttcttgtttcattgcttcataaaaatcttttggctctaaatacttcccagttatttcgtgcgggttaatgtcatcttctagacgaagtgtaactaactctggacgaggacgcacgtgcattttcttgaatgcatgaccatcagcttcatctattttaaatacgataccgtcaaaacgtggatcattgttcattgcttccatgtatttctctgtttgctctacagttccagaacaagttccgttaataccttcttttgctacaagaattcttccttttaattcaagtgaattacaaaatgctaaatgctctgccgcgaattcttctgggttttcaattgttgtgtacatgtaatatagtaatactctgtatggttttgtagttgccaatgtatttctaccacctatctaattttttaaatcatgtataagttaacgttcatatcaaaacatatataataagaaaatgaatcccattttcttttctttatactattttctatcagttaacaaaaataaaaaacaagattacacaccaaaacactatggttatgttgtaatcccaatatattatatatcatacaaatgcaattccatcaattaatatgctgtattatcagctttatgttcacataaatttcaaaaacagccctttaattcactatgtttccccacgtcatcacaccataaactcccaattcattttacgttatcacaccatccattgcataaaggcatataatttgcattaaggaaactttcgtgttcaaatgaaattaccatataatatatttaaatgtattgaaataatgagtaagaataaatacaataatttcatcaagttaacattttaaaggggaaaactactatgaataaagatataacaaaagatgaacatctcccttctgaaagtacaactgtacaatcagctcacttagctttaagtggagaaacaaaaggctggaaaagactgttaccatttttaggacccgcttttatcgcgtccgttgcttatattgatcctggcaactttgctacaaatatcgcagctggttcacaatatggatatttactattatgggttatactcgcttctaacttaatggctgtattaatccaaactttatcagctaaattaggaattgctacaggaaacaatttacccgaaatagctcgtgaaaactttccaaagcctgtgtctatcggcttatggatacaaggtgaactagttattatggctacagatttagcggaatttattggagctgctttggggctttacttactatttggaatcccgatgctacctgccgctttaattactgcagccggatcatttattattcttgagtttcaacgtagaggatttcgtccactagaagctattattacaggaatgattttcattgtagtaattgcttttgggattcaagttttttatgcaaaaccagaattaagtccccttctttcaggactatttattccaaaattccaaggtgtagacagtatattacttgcagcagggattttaggtgcaacagttatgccacatgcaatatacttgcattctgcattaacacaacgccgcgtggtcggaacaactgacgaacaaaagaaaaagatttttcgtttcgaatttatcgatattattattgcaatggttattgctggagcaattaatgcaagtatgttaattgttgctgctgcactattctttaaaaacggcttgcacgttgaagatttagatgttgcttacactcaatttaccaatttagtaggtcctgtatcggctgcattatttgggattggacttttatcagcaggactatctagctcttctgtcggtacaatgtcgggtgatattattatgcaaggtttcattcgcatgcatattccgttatacttacgccgatttattacaatgattccaccattagttattatcgctttaggtgtaaatccaacttacgctctagtcatgagccaagtcgtcttatcattcggtattgcatttgcgctagtaccacttattatgtttacaagtaacaaaaagattatgggtgcactcgttaaccaccgtataacaacatttatcgcttggataattgcagcactcgttatcattttaaatatcttcttactgtatcaaacatttgtaggataatgaaaaagggtattccaattttaatttggaatacccttttttcattatttgtattaatcctataaagtctttttaaaataaattttataatctatttccagccaataacttccttacaccttgaataatctttattttcagattaaattatataataacaaatacattctattttcatgtgaaaaggagcgaaaatatgtttcctttattaaaaactgaaagactcattttaagagaacttaccaaagaagatgcaccgcgtatactacaatgcttttctaatactaatgtactgcgctattatggccaaaaaccgttacaagatattgatcaagtgaagcaaatcattcataattttaagttgagttacaatgcaagaagcggtataaaatggggaatcgaattaaaagacacgaaagaactcattggtaccattggttttcacgattggtcttctgagcataaacgagccaatataagttatgcctttttgcctgaacactggggaaaaggatatgcgactgaagctgtttctgagattatatcatacggtttccatacgattcatttaaagcggattggagcaattgtatttcttgaaaatgaagcttccaatcaagtactattaaaattaggctttgaaaaagaaggcgttctaaaaaattatatgtatcaagatgatgtcccatatgatacgaatttttacgctttattgaaatcggtttaatagaattcatgtgtaaaaaaccttacttttaaaaagtaaggttttttgtatttattcattagcaatataagcattcttataagtataaataccaccaaattgatgcttttcaattccttttacataatccttttgtacatatgctgagccaatatgataaagcggcgctaccgcagcatcttctaataatacctgctcggcttctcgcaacgcttcccatcggttttccgtatctagtacaaaatccgttttcgctttctttattaattcatcgtaatgaacattagaataattcattttattattcggattccctgtcgtaaataactctaaataactaattgggtctttatagtcaggtccccaatttgccatagttatatcgtaatcacctgtttgttctaactgtaatttttgcttaaatggctgttgtttaatttgtatcgcgattccttgcaaattcttttctaaatcaccttttatatattctgccatccgttttgcattatcttgttcaaacgttaaaaactcgaggtttacttgctctacttcaagctcttttttcgcttctttccaaatcttttgcgcattttgcaaatcatatgaagaaagatctccgttttcttttctaaaatctttaccggtcacttcatttacatgaccaactggtacaagcccgcttgcaggttttgctccgttattaataaagtgagcaacaaaatcatctttatttaacgctaatgaaatagattgacgcacctttttatttgctaacgcggtatttttttcattaaaacgaagcatggcaattccaggatcactcgacatatgtaattccttattccctctatacttgtctacaatttgcgaattaataggtactcgatccaaatctccggcttcatataaatttacagctgtcattgtatcctttacgatatgaaagtttatttcgtctaatttcactttcttttgatcccaatatgtagcattcttctttaattgaaactcttgttcatgcttccatttttctaatacaaatggcccgttatatatgagattactaggttccaatgcataattgtttccttgttctttcaaaaatgattcatgctgtggtaagtatataggtagtgctaacaactgtaaaaaatacggaaccggctgttcgagttcaacttctaacgtataattatttattgctttaaccccaagtgcatcaagaggcattgttcccttattgatctctttcgcatttttcacataaaagagcatggacgcatattgagatgctgtttcagggttaattgcacgtttccacgcaaatataaaatcatttgctgttacactatccccatttgaccattttgcatctttacgcaagtcaaatgtatatttcttaccatcttcacttcttttaaacgattttgctatggctggagtagactgatcttgatcatttaatacatataacccctcaaatatattctgcataacgtgggctgatgtaccatccattgttttcgcagtgtccagagaaggaatttcttctgatactgttacatttaacacttgttttttaacctctgtatcacttttattcgctttattattacaagctgttaataataaaaatgtaacaagtgccattaccattaaatggctcttttttcgcttcatgagttgttctccttaaatataaaatattataaagcgtaatatattatagcagaaatactaacagaaagatgcgacattcttttgaatatttattcgttcaagaaaaaagctatcctttaaaaggatagctttttcaactgccacataattatctatctttgcaaacctcgtttataacgacttgcttcaaatataatacgctcttcatctaacgttttacattcgccattccaaacgacatgttttccgttaataattacatcgcttatatcttttccactagcagcatatacaaggtgtgataacacttcatccgctggttgtaaatgaggcttattagacggatcaattgtaatgaaatcagcacattttccaatctcaagtgatcctgtttgtttcatcccgattacttcagcagctccttttgtcgcaagtgtaagagctgtttcaactggtaaagctgttgcatcttggtgaatacctttttgtagtaaagtcgctatgcgcatttcttcaaacatatctaaattattgttagatgcaacactatctgttgcaattcctacttttattcctgcttctagcatcgcttttacattcgctataccagaacctagttttaaattactattcggattatgagctactcgaacgtcattttctgctaaaaatgcacgctcatcttcatttaatactacaccgtgtgcaataactgttgggcgtttaaacaatccgcagctcgctgcatattctactggacgttttccatattgtgcttcaatatcacgtacttcacgctctgtttcagaaagatggatatgaaccatcgtttgattctctactgcaatccgtgcgcactcttctaacaattctgtactacatgtatatggactatgtggtgcaaccatcgtagttaacatgccactttcgttatagtaacgcttcacatatttctcagcttcttcaatcgctttcttttcatcgtctttcgttccgaagctaaataaagtccttgaaacagcagctcgcatcccgctccttgataccgtttccataattgcgtcttgatctactccaattggattaaacatgtcagagaatgatgttgtaccacttttcaccatctcaagtaatcctaattccgtactagcgaccgcaatttggggagtaaattgactttccagtggccaaattctcgtctcaagccacggctgtaataacatatcatcgccaatacctcttaggagactcattacaacgtgtgtatgtgtatttacaagccctggtaaaacccactttcctttcatatcaattacttcatctacttcaaaatcattagcgaattctccgctctttacatctataatttgatcattttctacaatgatatatccattttctatcacttcgttttgttcattcatcgttacaattgtagcgtttacataagttgttttcaaaagtatttcccctttcaactctatgaagttccctttaataagttaccaccattatagtaacttattaaagattaagagtcaaaagataatttgaattctttcgttactttttccttcaaaatgctatattgtttttcatttgtatctgcaaatgcttctttccgatttgattccacatccatataattcaatttcccattgaattgagtctctgtaaaatcaaatctctgcccatctataaagttataaaagtgccatacctctcttacttttgtctttttaatttctcctccatatatgtcttgaacgactagagccgttacaccacactgtccctttgctgggttttcaattgtccactttgaactcgtttcaatcgaccacgattttattagtgcttcatatattcttttttcctttacatcatccattctaatcttcccctactattaatagttttacacatcatatttcaaaagaggcagtacacgacccttaaagacagttgatggtgtctctcctattaactgtgcccccattttcaagtaatatccttttgcattcggatcactatcaatcgtaaaactttttaatcctagttcattggctttttctattacgtactcccaaagtattttcccgtaaccttttcctttgtaatcaggatgaatgtacaagaaatcgagagctttatcattacgtaaaaatgagaaaaaaccaatcttcgcattatcgttttctaaaacatatacaaaattattttttatgtattcttctgtaattgttaaatcttccttacaagcaagtatgaattcttcactataatcccacgttgcttttgattgtagtgcgaattcacttaattcatttgcttcacttaataacgcttctcttatcttcatgattctttctcctcaccttcgatatgtaaactactaaattgattcggaaagcacttcaaaaaacctttttttcataaattagaggttatttttataaatctttattataaccagtacaatttttttaaagaaaaagaacaccatccctaaaagttggtgttctctttttctaaaatttaatcttcaaactcactcattcgttttactatttcgtacgatacaaacctatacagtttctactaccgcttcaaccattgttccatttttagcataattcgtatgccaagaaaaagctttttctaaaatatgaggagtttgtccacctcttgtttttgcttcttcgtaataagcacgtagttgatcacgatacattggatgtgcgcaattctcaataataagttccactctttctcttggcgcaagtccccttaagtcggcatacccctgttcagtaacaataacatctacatcatgttcagtatggtctacatgagaaacgaaaggaacaatacttgaaatgttaccacctttcgcaatcgatttagtaacaaagatagctaggcgtgcatttcttgcaaaatcaccagacccaccaattccattcatcatttttgtacctaaaacgtgagtagagttaacatttccgtatatatctaattctaatgcagtattaattgagattaatccaaggcgacgaatgatttcaggatgattggaaatctcttgcggacgcatcattaatttgtcacgatatttttcaaagttagaaaatacttgttgcattttctcttcagaaagcgtgatagaacaacaagaagcaaaattgacttttccagcatccataagatcaaaaactgcatcttgtaaaacttcagaatacacttctaaatcttcaaattctgaatctaacattccatgcaatactgcgttagcaactgaaccaattcctgattgtaacggcgctaaacgatttgttaatcgccctattttaacttcttctcgaaggaattctattaaatgctgtgccataatgaccgtttcttcatccggaggaacaattgtcgatggcgaatccaattgattcgtaaacacaattccctttactttttcaggatcaattggaataccgattgttccaattcggtcatctgttttcacaagcggaattggaagcctctccccttgtttacctggttcatatagatcatgtagtccctctaattgcgtggattgagccatattcatttcaataataatagacttagcatttaaggaaaacgctaaggaatttccaattgaagtggttggaataatcattccgtcctctgtaatcgcaaccgcttccaaaatagcgaaatctatatccagaacgtcagcgcggagtaactctgctgtatgagataagtgttgatccacaaataaaaagtctccgttattaattccttttcgcatcgtcgcgtcagcttggaaaggtaatcttttccctaaaattcctgcctcagcaaataatttgtctacatccgagcctaaagaagccccagtataaacatttactttaaaagattcatcattcttaactcggtttacaagcgcaaatgggactgcttttacatcacctgcacgtgtaaacccacttaagcctaaagtcattccactttgaatccaggaagctgcttcttcaggtgtaactacccgatcttttagacgttgatctctgattctatctaaattattctccatatgtaatccctctctcattgaatattcataattattttacacatttacactatcaaaatagggattttagtatacaatgccgaaaattcagacagaacagcaaatttaggttctaaagcagaaaaatttagaatcctagaagcttacggaaataactagcgtatgattgactaactggtactctctcaccattatccatcgaaagtacaaaagtagaatgggtatcaggataaatcgctttaatatgattaacatttacaataaatgaacggtgacatctaataaatgaatctttaggaagcaagtattcgaattcttgcagagagtatttatgtgttcctgataactcttctgaattcacgtacgtctttttatctttagcctctaaatacataacctttgaaaaaggaaccggaatccagccatctgttgtttttaaagtaacgactgactttccatccgttaaagctggataaattgccgttacgcacccttcaagctttccattgtttgaaaatggtacagccattccatgataaggaataccaaaaacatcccgattcataaactcagatgttttttgattcatcaccatcgctttatgagcaatcgttccttcctttatagaatccccagcgctaatctttaaatcaattcgtttacttggccgatagtaaatatattctttcgtattcgaaacagcaattgaaatttcatctgaaaataattcaccaacaacatctagtaataaacctaatgttctatcttccattctattaacacctcattcactattatactactattatgaacgagcatctgttgctttataaaaagtttgattttaaattatttttaaaattagttttattcactattacttcgttactacaaaaagcctcacttcagaaaagtgaggtttcctctcatacaatatttctttattttttaacgactatagaataagatttattttttattaagtaaagtgaatttaagaatttattgcccgtatttctgtaaaataaataatcccaaactacaaacagtttgggattatctttctcatttattatgcgcatctaaccaagaaattaaatctttaaatacttcatccttatttacttcatgaaacatttcatgtctaccattttcatataaacgtagtgtcacgtctttcacaccacattttttatagttttcatatacttcttttacacctttccccatatcgccaacaggatcacgatcaccagaaaatatatgtattggaagattctttggcgtcttcttgtattcttctagtttatttacttctaatacaccagaaaataattctcggtaaaaactcgtcgtacaaatgaaaccacataacggatccgcaatatatttatcaacttgattattatctgaagataaccaatcaaattttgtacgatttggcttaaagttcgaattgaagtttccgaaagataaaaagtttagcattggacttttcgtttttgcaccacgcaatttcatttcgattgttgctactttatgaccaatagctcctaaaagccctggatttccacctgttcctgaaatcagaaatccatcatataattcgcctctaagttgcacagcacgtcttgataaaaaagaacccatactatggccaagtaaaaataacgggcatgtctgctcttttcttaccgtttctgatacaaaaataacatcagacacagcctcattccaacctacatttggtttaaaatgaccataatcttcttctcttttcactgttttcccatgacctttatgatcatgtgcataaacaccataccctgcttctaataacgcagcaataaagtctgtataaacacctgcatgttctgtcataccatgtgcaatttgaataatccctttcggtttaccttctggcaaccacttgcgtaaataaatttctgatccatccaatgccgtaacgaaactttcctgtacgttcatttcgtcagctcccaactctattatgtatctttaaaaatgaatatcgattcatttttcttactatgtattatatgcaattgccttcattatgacaaatgactaccttttccaattagctcaataactattatgttgacgaatcgaaaataaaattatatagttacttacataaagtaactgtataatttttaggaggtttctactattatgatgccatcattatttttagcacatggttcgcctatgctcgctattcaagatacagactatacacgatttttaaaaacacttggagaaacatataaaccgaaagcaattgtcattttcactgctcactgggaaagtgaagtattaacgatttcctcatcagataacgagtatgaaacaatttatgattttggaggttttccccctgagttatacgaaatcaaatatcgtgcgaaaggctcttctagcattgcatctatgttagaaacaaaatttaagaacaaaggtatttcagtccatcataatatgacgagaggtttagatcatggttcatggacactcctgcaccgcatgtatccagaagcaaatattcctgtcgtgcaaatatcagtcaatccattcctttctgcaaaagaacaatttgaaattggagaagcacttaaaggactcggacaagaagatattttagtaatcgggagtggtgttaccgtccataacttacgagctttgaaatggaatcaaactacacctgaaaaatgggcaattgaatttgatgattggattattaaacatatgcagcataacgataaagatgcattgtttaattgggagaaaaatgctcctcatgcacaattagcagtaccaagagcagaacattttgttcctttatttatcgctatgggaagtggtgaaaatagcggtgaagtcattcaccgtagttatgagcttggtacattaagctatctatgtcttaaattttaaagaaaaggatgaagcaatcattgcttcaccctttttttattcactaagttaactaacttccaaatgttgtttctctgatacctcttcgttcttattatgaaaataaacccagatacacgcaataaatagtagtgatgatgtagagaggaaaacatattggaagcctgcatgtgctgcaatttgccccccgagcactggaccaatcatatttcctaaaaactgaaatgattgattatatccaaatatccgtcccgtaacatgggttggtgtatgttgttttagtagagtttgtacggaaggtaataatcctgcttgtgcgatacctaataaaaatcgaagaattaataggtgccaagctgaggttacaaatgcttgcgggataaaaataattcctgcagcaaataacgctacaactaacgttttttgaggaccgatatgatctgataatcttcctagtcttggtgctgccaaaataacggctaatcctgttgctgacataactgctcccgcaattgtttcaatatgtgcagtatgaggacctactaaatttttcacgtacaatgtaacaattggttgaactgacatattagcaagttgaataataaatgttgttacaaataaactaataattaaatgcttcgctgggaccatcgtccatacttttttcggctgtgttttttttgcttgagcagagtgattttcttcatgcaagaagaaaaaaacgatgagaaaggaaaggaataaaaaagctcctgtaacaagaaagacatgacgcattccaattaactcagacaaatatccaccaagtaatggaccaagtaaagaaccgctcacgccaccagttgaaattgtagaaattgcccaacctgaatgttctttcggagtttctgctgcaataaatgtcattgcggttgaaaggaaaccagatactgctcccattaaaaatcttagtgcgactaattgatatacatccgttacaaaccccataagcgtcataataatcgccataccgaggctagcacgaataagcatcagtttccgtccatgtatatcaccaagctttccccatattggcgatacgatcgcacccattaaaaatgttacaccaaatgcaagtcccgaccactgtgcaatacttgaagtgccagttactcctaattcctcaatataaaaagataagaaaggaattactaaactcataccggctgcagtggtaaaacaacctagccaacaaatcattaaatttcgtttccagctggccattttcacaccttctttctttagatacccattctacaccctttcttgtaaaaagtttagtaatttgctttttatgcaagatttactacaaaacccgctattttctagtaaaaaccactacatctctacatcattttcataataaaaccaactcctctatatgaagttggttacttattatctatcggtattaaacgagcattacaatttctctcgtaaaactcaatgggacctgcttgtccaataatcgcatattcatatccatcttgcttcatattatataaacaatgatacaataattcttttcctacacctttcacacgattttgtttcgctatgcccattggaccaaacaatcctttctttcctctcactacatcgtaacaggcgaaaccaactattacttcctcctgctgtgcaatatagataggtaacttttcattatatgtccgatatccgtaatcaaccgactgtaaccaccgttcaccaaattcagccgccacaaatcgtgataacttatcaaaatcagaaggactagctcttcttacatgacaaaataatgtattataaatagatttaaaactatttaaatcaaccgctaagtctctcggtgcagctgtaatacgtaatatatctttttgcatttgtgtatgtataaattcaccaatatctgtatctacacgaaataatgcatacataacatgtccttcattgattactacttgctgaaagcgttccatacgtttcttcgctatttgtaaaatttctatcgccttataagatagtttatattgtcctatttttttatactcttgatgatgtaaatcgaatcgttttcgtaacgaaagtttttctaaaaaatctggaccgactttatgaaacaaatacataaataactcagcgcaaactcctgtaccttctttacacatacctatgaacagatggactggttgaattatgttatactcactctcttctgctgcaatctccaatattttatgcacacgttttgtaaattgaaattcctccatatgtgtttccaccctctactaatttactaacaaaccgtaaccataaataattgaaacaattacacctactaccaatatacctggaagtaaatttgccaccttgattttaataatactaagcaagttcaatccaatagcagatatcataatgccgcccgtagccgtcatctccactataaattggttcattaattcttccgggacaaaactattaatttgtgttgcaaaaactgcaataccaccttcatataaaacaactggaatcgccgaaaatactacgccaattcctagagttgtcgttaatataatagaaataaatccatcgataattgccttggtaaataaaatattatgatttccgcgaatcccactgtcaagtgcaccaagtatccccatcgcaccaattgcaaaaattaaagtagctgttacaaaaccttctgatatgcttcctttccccttcgatccaactttattttctagccaatcccctaaattttttaacttttcttctaattgtaaccactctccaattaccgtaccaatcactaaactcagtatgacaacaagaaagttttcactttttaatgccatttgaagcccaagcacagtaaccgctaaaccgattgcgtgcattatcgtccctttcatactttctggaatcctactaaataatttaccaagtaaagtaccaaatataatacaaattccatttacaactgctcctaatataaccatttctcattcttcacccttcgaattctttatttctatattttggtttatacattgatttacaggttatctatatgttaacttaatattgagaatattaacaaatgttttccactacataacccgctgtttttttgtaactttaattacctttaatagattcagtgttaatttaattgcgggataatattaaaagggaaggtatatatgaaaactttactaaaacgatttttgttaatagcctttttcattacaccgattgttttattaatcaattactcttttatttcaaaagcaaaagacaaacccgatttacaaaacaaatctagtaaaaccgcttcaaaaagcgaaaagaaaatagaagaccaagaaatcacactcaccttctctggtgatacaatgtttgattggcaattacgtcctataatcgaaaagaatggggctgattacccattccaacatgtaaaagaagaaataaaaaaagctgatatttcttttgtgaatttagaatcggcatttacaacgaaagaaaagaaagcacctgggcaactcttttggattaaaagtgatccatctacactacaagctattaaaaacactggatatgacatcgtaaatattgggaataaccacacacttgattatgggcaagatggattattagatacgatttctcacgtagaaaaattaaagttcccttacattggagccggaaaaaatgcgaaagatacatatacagcacgagaaatgaccgtaaaagggaaaaagtttaaatttctttccttcgttcgatttatgcctgattctaattgggtagctggtgagaataaacctggcgttgcgaatggctatgatttaaatcttgtaacaaaaacaattaaagaacaaaaacaagatgcagactatttaatcgtctatatgcattggggcgttgaaaaatcaaaccgtccggtagaataccaaaagcaatatgtacctaaaatggttgaagcaggagctaacgcgattgtcggaagccatccacattggttacaagggtttgagtattataataaagttcctatcgcttactcattaggtaactttttattcccaagttatgtgaatggaaaaagcgccgaaactggcgtattaactttaacttttaaaggaaaggatgtccaaatgtcattcaatccttatatcattcgcaacaaccaagtttcccctgtaaatgaggaagaaaagaaaaaagctcttcaatatttacaaacaatttcaactgatgtagaaattgatgatacagggaaaataaaaaataaacgaaactagacagctcaagatctatttctctgtaatctactttacagaataggtgataaacatgctgaaaaacttattagaaaatgtaagtttgttagaaaatatttataaaatgtctatagccgttctacttttatgttcagttttttctgttagatttctaaaaaaaataaaacgcgaacgaaaacttactacctttgaatttactatgtatgtaattattcgcattgcgatatttttttggttaactagctttattcttcttgaatttaatgagtatctagtttaactataaaaaagatagaacaagcactatatttctttgcttgtatctatcttttttatttagatgcttattcttcccttctattaaataagcaaatcaaacaaaacagggtttttattaagctccataaattgaatattattttctttaaagcgagtaattaattgctcataatcttctttatgttttaactctactccgactaatgctggaccattttccttattatgtttcttaatatactcaaaacgagtaatatcatcttctggccccaatcctttatcaagaaattctcttaacgcgcctgaacgctgtgggaattcaatgatgaaataatgctttaacccttcgtaaatgagagatcgttctttcatttcttgcattctatcaatgtcattatttccaccacttagcgtacatacaactgttttaccttttatttcatccctgtataaatcaagtgctgcaatagagagtgcaccagccggttcagctacaatcgcatttttcttatacagttctaaaatcgtcgtacaaactttcccctctggtactaaaacgatgtcatcaattacatctttacaagtttcaaaagttaactttcctacctttttaaccgctgccccatcaacaaaactatctattttctctaatgcgacattatcattttgaagaaaagcctctttcatagaggcagctcccatcggttctacaccaataacctttgtagtaggactaacaccttttacatatgtaccaacacctgatgctaatccaccaccgccgattgccgtaaagatataatcaaccggtttctccatatcatgcataatttcaactgccactgtcccttgaccagcaactacatacggatcatcaaacggatgaacaaatgtcattctattttcttcacaataacactgtgcttcttggaaagagctatcgaatgtatcaccaactaatacaatctctgcgaaatcaccaccgaaaaattgtacttgtgatactttttgtttcggtgttgttgtgggcataaatattttcgacggaatcttcaataaattacatgtataagcaactccttgcgcatgattaccagcacttgcacaaacaacaccgttttgtaacttttctttcggtaaactttgaatcaaattgtatgcaccacgaattttgaaagagcgaattaattgtaaatcttctcgttttacataaacgtcacaatcatatttctcagataaaactgtatcacgttgtaacggtgttttaataacgatatctttcatgcaattatgagccattaagatatcttcaattttcactctctcctttaccttttgcaccattatatatcatccttatctcttttaaattggctcaatcaaaatgtgggattttcagaacagcccctgtattcgccgatgttaccatttgtgcataacgtccaagccagccagttttcactttcggttctggtcgtttccattcttttttacgcttatctaattcttcattactcactcttacttctagcaagcgttcttcaacatcaatacatacaatatccccttgttcaagaagtgcgattgttccaccagctgctgcttctggtgaaatatgtcctactgaaattccacgtgaagctccagagaaacgtccatccgttaataatgcaacctcagcacctaatcccattccagcaattgctgatgttggtgctaacatttctggcataccagggccacctcttggtccttcgtaacgaatgacaactacatctccttttttcactttcccaagcataatgccagcaagtgcctcatcttgtgaattaaaaataacgcaaggtccttcaaaacgctttacctctgttgcaccgcttttaataaccgctccatctttcgcaaggttgccttttaatatacgcaatcctccttcctcactatgagggttttcaagagagtgaataacttccttatctttaatctctgcctcagcaatattttctcttaatgtttgcccagtagcagttattcgatcaagatgaagtactccttctttccggctcatctctttcaaaattgcactaatcccgcccgcacgatcaatatcttccatatgccaattggaagcagggcttactttacataaatgtggtacacgtcttgaaacggcatcaatacggttcatatcgtaatctaatccagcctcttgcgcgagcgccaatgtatgcaacactgtatttgttgaaccgcccatcgccatatcaagcgcaaacgcatcatcaattgcttcttccgttacaatgtctcttggtttaatatctctttcaattaaaattttcaatttctctgctgcttgtttaattaactcttcacgtcttggatcaattgctaaaatactcccgttaccaggaagagctaaacctaacacttcacataaacaattcatagagttcgcggtaaacatacccgaacaagagccacaagatggacagccatgatcttcaatatcttttaattcttcttctgaaattttcccagattgataagctcctactccttcaaaaacggaactcagatcaacaacttctcctttagatgtttttcctgctgccattgggccgcctgaaacaaacacagtcggaatattaatacgtagtgcagccatcatcatacctggtgtaattttgtcacagtttggaatacaaatcatgccgtcaaaccagtgtgcatttacaaccgtttctactgaatctgcaattatttcacgactcggaagagaataacgcataccgatatgtcccatcgcaataccatcgtcaactccaattgtattgaattcgaatggtaccatacctgcctcacgaactgcctcttttacaagtttcccaaactcgttcaagtgtttatgccctggaataatttcaataaaagaattacaaatcgctatgaaaggtttatcaaaatcttcatctttcaaaccagttgcttttaataaactacggtgcggcgctttatcaaaaccttttttaatcatgtcacttctcatcttgtcaaatcccctcttacatatttttcatttatactctcttactctatttctttactaattctttcggtgcatgaatccaactcatcatttcacgaagctctgctcccactttttctaattgatgattttgttctgcttttttcattgcgttatacgtcggacgccctgcttgattttctaaaatccatttcttcgcaaattcaccttgctgaatttctgtcagaacacgcttcatttccttcttcgtttcatctgtaacaattctcgatcctgttacataatctccaaattctgccgtatctgaaatagaatggcgcatattcgttaatccaccttcgtacattaagtcaacaattagctttaattcatgcaaacattcaaagtatgcaatttcaggacgatatccaccttccgttaacgtttcgaacccggccttcacaagtgcagttaccccgccgcaaagtacagcttgctcaccgaataaatccgtttcggtttcttcttggaatgtcgtttcaattacacccgcacgtgtacaacctacaccttttgcatacgctaatgctacatgtagcgctgttcccgtcgcatcttgatgcactgcgactaatgccggaacaccatttccttcttgatatacacggcgaacgagatgacctggactttttggcgcaaccattgctacatctacgtaacttggcggattaatttggccgaagtgaatgttaaatccatgtgagaaaagtaacatttgtccttcacggagattctcttctacttctgatttatatacatgtgcttgctgttcatctggcaataacatttgtacaacttgtgcggttcgaaccgcttctgaaacagacattacttcaaatccatctacttttgctacttcatacgatttaccaggtctaacaccaactacaacttccacacctgaatcacgtaaattttgtgcctgcgcatgcccttgagatccataaccaattaccgcaactgttttcccttgtaataactctacatttgcatctttctcataatacgttttcatactccatacaccccttataatttatttacttgcagtacatcaattaattttttcaactgactaacaagtaatgtcgcttcattttcagtacaaactgctgtgagtttcatttcagaaacgccactcgtatctctttcgtttaaatgtaaagaagaaatataatagccacgccgagcaaaaattccacttatacgtaataagacacttggctcgttatgaataacgagtgaaaaagtatgactcattcttcccacctcttcataatcatttcgttattccctttgtttggcggaaccatcggaaatacgttttcaccttcttctacacaaaaatcaactacgacaggaccttcgtgagcaaatgcttctaacaccacttgtttcgcctctgttgaatttgtcgcccttaatcccttcactccataagcttctgccactttcacaaaatctggtgagccaatttttgactctgataaacgattttcataaaacatttcttgccattgccttaccatccctaaaaatctgttatttataataaatacttttacagggatgttattttcagcaattgtttgtagttcttgaatgttcatttgaaaagaagcatcacctgcaatacaaacgacgagttcttcttcttttgcaagctgagcaccaattgccgctgggaacccaaaccccattgttcctaatcctccagaggtaaggaacgtccgaggttttcttgctttatagaagtgagcagcccacatttgatgctgtcctacttctgttgtgacaatcgcttcaccattcgttaattcacttactaagttgatcacatgctgtggttttaactcagattctttttgcttataagaaagtggatattcttctttccatgcctttactttctgaagccattcatctgtttgtgtataaatagacatatgtaacaacatgtgtaacgcttttttcacatcaccaacaatcggatgctctacagttacatttttatgaaactcagaaggatcaatatcaatatgtacttttttcgagtgcggagaaaaaagttctaatttccctgttacacgatcatcgaagcgaacacctaatgcaagtagtaaatcacattctgttaccgccatattagcagcgtatgtcccatgcataccaagcatccctagaaacaatggatctcccggtggatatgcaccaagtcccattaaagttgaaacgactggaatacggttctcccttgcgaattcgaagagttcatcggatccacctgaatgaatgacacctcctccaatataaagaagtggacgctttgattttgaaattgctttagccacctctctaagtttcatgctgtctggtacaagttctggtttgtaccccggaatatcaacttcttcattaaagaaactggtgacttttgcattttgaacatcttttggaatatcgattaatactggtcccggtcgtccgcttttggcgatgtaaaaagcttcttgcacaattcgtgatacatgatttacatcacgaacttggtaattatgcttcgtaacaggtactgtaattccgacaacatccgcttcttgaaatccatctttaccaattaaaggcgttgcaacttggccggtaatgacaactaaaggaatcgaatccatataagcgtctgctaagcccgtaactaaatttgtcgcccctgggccagaggtagcaaagactaccccgaccttcccagaagctctcgcatatccttcagccgcatgaatggcagcttgttcatgacgagttaaaacatgtttcaaaccactttcgtataacgcatcgtatactggtaaaatcgctccgcctggatagccgaaaacggtcgttacacccaatttcttcaaaccttgaatcacgtgcccagcgcctgtcatttcttcacactgtaacttctcatacgctgtatactgctgcttcatttcaattaactcctctccttatttatgctaagctttccgtcagcccgggaacacgtactcctctttctctcgttaattttttaaattcttcggtcaattgtttcgttacacttcctggtttcccatctccaatttctctcgaatcaacttttacaactggaattaactccgctgctgttcctgttaaaaatacttcatccgctacatatacgtcatggcgagtgaatggtctttcctcacacggaatactcagtcgttcacatagctcgataacactatttctcgtaataccttctaatgcccctaaataggatggcggggttaatacttttccatctttcacaacgaaaacattatcgccagaaccttcacaaacatatccttgttgatttaacataagagcctctaacactcctgcttgtgccgcctcaatttttacaagtacgttatttaaataattcattgacttaatacgtggatctaacgcgtctggcgtattacgtcttgatgcaacagatacaacgcttagcccattatcataaaattcttgtggaaataactttaattgttctgcaatgataattacgctcggcttcacacaacttctcggatcgagtcctaagtcaccttttcctcttgagacaattaagcgaatataagcatcagcgtattcatttttttggagtgtatgtaaaactgcttcttccatttcttctaccgtcattggaattgttagtaaaatagatttcgctgattcatacaatcgtttcacatgttcttttaaacaaaatacatttcctccgtaactacgaatcccttcaaatacaccgtctccgtataaaaaaccgtgatcatacactgaaacaactgccttttctttttctacaaattccccattcatgtaaatgtactggtttcccatctcacatcgctcctcttttttctctatttttgcaatctatttctacatcgattgctgagatgagtaattttaacagaatattcagtatataaaccttaaaaatatactcgtctcaacaatcgattacttacatacttgtagcaatccattgctgagacgagggaatcgtggtaccactcagcttccttatacttctcacgaaatataagctctgcaagtccaattagacttttgtttttctatcgggaacaaccccgctactttttactagttttcaaaagtagtgctccaaggtgattttcaatgagtgaattgttaccaccctcacagcctcggggcagctctctgaaacaatctttatcatttactctcctcttctacgcattctcttcttctatttttaaaaataaaaactctcgcctcagcaatcaactactacaatttagtagctttgattgctgaggcgagagtttcgcgttaccactcagcttccttatacttctcacgaaatataagctttgtaggtccaatcagacctccgtccttttaccggagacgatgccgccgccctctactcagtttccctttcgcaagcgatgctccgaggtgatcttcaatgattcgattgttactaccctcacagccttggagtagctctctgaaacgatcataatcatctactttcctcttctttgcatatacaacatataaagttagaaaattcttaattaacttttatttgttacacgtattataggacgttgttcttttcgttgtcaacatgttttctcaaaaaaatcaaaattcattctatttattttttctcaaatcaaaattggaatgcattacttacatacactcatatattacttaagtatgtttgcattactacataaagaaaaacttataaagtttatgaggagatgaggaaactatgttaaaagggaaagtagcgttagttacaggagcaagccgaggaattggacgagcgatcgctaaacgtttagcaaatgacggtgcattggttgctgttcattacggtaatcgaaaagatgacgctgaagaaactgttcatgaaattcgatcagatggtggccaagctttttctatcggcgcaaatttagaatccttacacggtgtagaaaacctttataacgctttagatactgaattacaaaagcgcactggtgaaacacaatttgatattttaataaacaatgctggcattggtcctggtgcttttattgaagaaacgactgaacaattttttgatagaatgttttcagtaaatgcaaaagcaccattctttatcattcaacaagcactgccacgtttacgtgacaatagccgaattattaatatttcatccgctgccacccgcatttctttacctgattttgttgcatatagtatgacgaaaggcgctattaatacaatgacttttacgctagcaaaacagcttggagcacgaggaataacggtgaatgcaatacttccaggatttattaaaacagatatgaatgcagaactcttgagcgacccgatgatgaagcagtacgctactactatttccgctttcaatcgcttaggtgaagtagaagacattgccgatactgctgcattccttgcttctccagacagccgctgggtaactggacaattaattgatgtgagcggaggatcttgtttataaaaaacatatattttcaaatcttttttattgcgcaataaaacaatttatataatactatataaaacatatacatttaggaggattacagcaatgtccgaaaaaacatacgaactcgcaaccttcgcaggcggttgcttttggtgcatggtaaaaccatttgatgaacttcctggtattcataaagtactttctggctatgcaggaggtcatgtagaaaacccaacatatgaacaagtaaaagctggaatatctggacatttagaagttgttcaaattacattcgatccttctatttttccttatcagaaattactagacttatattggccacaaatcgatccaactgatgatggcggacaattttttgaccgtggtccatcttatcgtaccgctattttttatcataacgaaacacaaaaagggcttgctgaaaaatcaaaacaagctcttacagaaagcggtatgtttaaagatccaatcgtgactgaaattcgccctgctgcacctttttacgcagcagaggaataccaccaacatttctataaaaagaatccagagaaatatgctactgagcaaaaggaatctggtcgtgaagactttattaaagaaaattggcaaaaaaaataataaaaacgcatcgtgcttttttaatacgatgcgtttttatttttgataaaagtaccatacaatgatgagaacaaccgctgttaatgcccaaagcgctacttcatttttcactctactctttttcttagtcatttcatctcctcctaatagcaatacaacgtattcaagatttcctctgtttcattgtccaccttatatacataaatacatccttaccaatccttataacaagaccaccaataattccgattgcaattgaaattactaacatctgtccaaagctaaaagaatttgtgtacgttatgtagagaacgatacatataagtaaaacatccggtaaagaaagcaaaaactttttaagcatttctttatctcctctatactttatttatatcttctactgtaattttgaaatatagtttgttcaaaaattccatttagaccctcattttatgaaaaataataagaatcccttttcaaaagagattcttattcagtagatttaagtttaattattttctacatatcctattccataattactcctaaaatagaataatattactaatcatttattgtaaattgactatttgccaggcaaccgaatgtcgcgccagctacctacatcgcattggccaaattcattattacctaccgcgactaccgtgccgtctgattttagtccgactgtatgtgcacaaccagccgctatcgctacaatatcgcgccaatcgcttacgttacattgaccatactcattccagcccactgccaccacggtaccgtctgattttagtccaattgtatgattcgtaccaactgctattgctacaatatttatccagccacttacatcacactggttatgtttatcattccccactgcgactgcttcaatatctcgccagccacttgcattacattccccttctttattccggcccactgctactaccgtgccatccgatttaaggccaacagtatgacaacgccccgccgctatcatatctttgggccatcgcttcactttttctttcgataaaaggtaatccatgttttacctccttgcatataagcaactgtatcataatagatatttttatcaaatttcattataaatctacatttacaaagaaagcttattttacttcttcaaaaaataaaaacctccagtttaaatactagaggttttctcgttatttcttcaagcggtcaataaaatcgttcaatttatctagcgatttcatattctgattgcaagctacaccatctttgcaaatgtagtttccctttttaacgaaagttcctggtacatcgcctttaatttcaactaaaaacattcctacttcttcatgcccatgacataatgaacaaatgctttttttatttaaactttggaacgttccttgcagaccaacaaatttatttttatcatttttcgctataataaatttcctgcttgatcccttatcaatccagcttaaataagatatttctttcatatccatttcttccatatcaggaagttttaacttttttgccttaggaaataacttttttaatgtttgtgctgtaacttcttgaaacggaattacatacggatttattttcattaaaaatgactctgcatcttctctattttgaactgttaataccgtatcaattaactctttctgttcatccgttaaattctcaaatacatgtattatcttttcaatcgcaagcgattttaacgcttgaattacacctctatcatttgccgttgcatgcccgtttgctaaaatataagcttgtgattttataaaattatattgatcacttctaataaacgcttccatctttatcactccatacaaattgttgatctagttttattgtatacaatgattacgttttttgatatgtaaaagataacttagaaacaaacattacatatatcacttattctctaccgctgcatttcctgacaaaagaagccatcatccgttttccattccgcatataatacgtcttcaaatttagtaattcctttttgctttatttgtttataaagccacccttcatcaaatcccgcttccctcaaattatccttaactacttttccatcactaattaatgaaattggtaagtatacaggcttatgttttaaacttaaatcatttacagtaggagattcgtatttactttttttcaaaacgcttatgtttccgttaggttccaatatcatatattcaacttctcggattgaaaatatatctttttgttgcctaagcatttgttgtaattggtttatatccaaatgatttacgcttaattgttcacgatcaatctttccattacgaataataattgaaggatatccttcaaaaaaccttcttgtccctcttactttttgtgttatcacttcaatagtataaattaaaattacccaaacaaatactgaatataaaatagaccatactttaattttaggatcatatattgaatttccaacgagctcacctaggacgattgcagaaataaaatcaaagggcgttagctgagatatttgtgttttccctaatatttttgtagcaattaatagaacaaaaaaaccaattaaaagctctatcgttatttgtccaatatgattcatatatgttcacctttctactcttcaaatgttctgtatagcatttaataaaaaaacggcacattttttctattatcatgcccgttcacacttcatatatccaatacatataaaacaaaaagagtctgattcaaagtaatatatgaatcagactcttttcctcttatttagaatacacaatctttttaatcgtttccccagaaagaaaatattcttctgcaagttgatgaatagcaatcccacttttaaacgcttctttaattgctttatttctttcatctaattgttttcttccgccagatcgtgtaccccatttataatgtttcgtttcttgtttcggaatgtaaattgtttcaccttgtatatacttttgaatttcagtaattaaactctccggtaaaacagcattagcttttacgtatttcatttctgctcgccccttattttttatggttcatttcaataaggtgcaaagccaaatataaaaaatgatacgagctcatataggcgattgtatattacttgtctacctcacgcaaagtatcgccatttccatacttggctttgcatgagacgttgcagtgtctggcaattgaattataatcgccatataaacacctcctaatataccttttgcattttattatatgataaattccttctccttgcatccacacccttcttaaagcacgaaattttatctaagaagggctatcagttcgtaacagtaaatgaattgcaaaaaagagcaaaataaaaaggtagcgtatctttgtatgatacgctacctttctttttatataatgccaagtacatttaagaatacgataataatcgcaattggtgcgatataacgaagtaagaataaccataatacgaatagtttataacctttatttttacttacacctagctctttcattaatacatctttcttcatttttaaaggaacaaagatagaaactaataatacaccaagtggcattaatacgttacttactgcatagtccgctaaatcaaagactgtcttcccgaaaatcttcagatcacttaatataccgaatgataatgctgatggtaccccaacaacgaagattaataaccctacgattaaggccattttttcacgtttccctttaccttttgatgttaacgatgcgacactaatttctaacatcgaaattgctgatgtaatcgtagcgaagaagaataataataagaaaacgatgaagaataattttccgaatgccattttactgaaaatagctggcaatacgataaataatagtcccggtccttgagatggttccattccaaatgcgaacacaactgggaaaattgcaagtcctgcaagtaatgtaataacaagagttaaggctacgatagaaaatgctgaacgtggtaagctttcttctttcggtaagtatgagctatacgttaccataacggctaccccaacagataatgagaagaacgattgccccattgcgtataaaataacttctgatgttacatgtgagaaatcaggttgtaagaagaaacgaactccttctccagcaccatctaacgtaagtgcacgaacgattgatacaaagaataaaacgaatagtgctggcatgaaatatttatttactttttcaacaccattttgtacacctttacttacgataaaaatagtaataaggatgaataatagctgtgatccaactgctaaatatggattggaaatgatttcaccaaacgtagcttcgtatgctccatttccttcccatagtctacctgtaatcgcattccataaatataataaaatccagcctcctacaacactgtagaaagaaagtaatatgaaacatgttacaattcctaatttacctaaccaaggccataacgttttaggagcaatctctctatatgcatcaacagcctctttttgtgtacttcttccaataacaaattcagctaataatagcggtaaaccaattaataatgtgaaaccgatgaaaattaggaagaacgctccgcctcctccaatgccggccatatatgggaatttccaaatcgccccaagaccaattgccgaacctgctgcagctaatacgaaacctaatttcgatgtccattgctgtgaattcatttgttaatctcctctctatctctttttctttgttacaattcggtatttatattgttctatcaatacttttttctaatacgttcacttcctccctaataataaaaaaacgcccctacgtaaatacgtagggacgacaaaaatatcgcggtaccaccctagttgtgaagaacactaagaaaccacctaaataaaaacgcccctacgcaaaaacgtagggacgataaaatatcgcggtaccaccctagttatgaagccacaccaaagttaggacctaaataaaaaacgtccctacgtaaatacgtagggacgataaatatcgcggtaccaccctagttgtgaaaaaatcttcaccactttatttgataacggtataaactaccgtctttcatttcctcaaaatatgagatttatgaaagatgctccaggacgaacttcatgaataatctatatactgattcacaccaaccatcagctctctgaaatagggagatattcactactataccctttcattgcccaaatattattttccgaattgattactatcatttttatcacacattaaaaatagtgtcaacttatatttcgaatttttatgtattacaatctatttaaaaattcgaaatataagttttagtttagaaaacaagtagcttagtacataacgaattctaacaggcaatagaaaaagaattacgtattattgatacttattcaataatacaaatcatctagaaacataacctgtctctctgtattcattttttaagagtttgatggataccaagaaaatttcgcatcactatccagtggtctatttttcgtttcttctttaattacacgaaaccattcatttagaatttgagttttgggcaattgagcagcaaggctatcttcccaaattacatgtgagaaccaggctttcgtttcccattcaaactgcaattgtgcgaacgaaattatagggtgatcagctccacgaaattgctcatttactgcatttgaaacttctggagcttgcggtaacaactcgttctgaattctatttcttatcgtctcattttctagctgatcccagaaatacaattgcccatttatttgataaaaaatatcaaatgaagcctcacctttcttcaaattcaataacacgaaggcacgttccacatcattgtcagccgcttttacagcattaacaattatattttgtgccattgatacccagtaactagtcgcttcctctaccggtgattcaacatacaattcttcacttaattcatgaagagtagcttcttgctcatttactttttcaacttttttaaaaaacctattaaaaaaacccataacttcccccttattactattttctatttcacaaaataaaaaatagatttttcttgctcatccacatttactcctggcgcgtatgtatgaacttgttgcaacacttcttctattagcaactctaactcctgcacacttttttctggattccctattaatgtgtccgccatacgttcatataatttttcaggtttaatagtcattcgttccacattattaggcatccatttaaacgctggatgatgtacgtacattttattcaaaccaaataaaacaccgaatacgttcctttgtacttcgcaaataacgtcataaagcataagccaatctttccgttttaaaagcgcctttcgattgtgccaacgattacttaaccatagattttctgaaatcatcagttttgctagttcatctggatatgccgctactttttcttttaattcattcgctttcccttctccatacaaactaacaccatcatgaatggatgatacaatacattgtttttcataatttatatcatattgatccaccacatccgaaattactttctctactgtctctgttaaaaagttactaatctctaatttaattccctctttcgttaaatacgtttccgaccattcttcttcctcatacggatgatacgataatattttcccatcaatatgataaataggggccctacgatcctcatcttccggcggtgttgaccataaaatatgtaattctatatctgaatgttcatcttcaagctttctagctactgaacccgctaaaataatagcttctactttcggattttgcctataaatctctgacatctctatcgctctctcttttaatcccatttcatttccccctaaaattgcagtaatcccctatatttcatttatctatttcgatattacagcttgcattaccttttcaaattcctacttaatcatatttctatccaatagcgctgaataacttcaccagtacgagaagaaactacttcattttctaacacacctccaaccttttgaatcgttttagcagaaccgatattggatttatcgcaagttattaatactttctgcaatcctaatttttgcgcttcagctaatgcaagttgtagttgtttcgtagcgtaaccgtggcgacgtttattcggatggacactatatccaatatgaccgctttcccgtaataattctggatttaatctatgtctaatattcaaaaaacctataagttcccctttttcaaaacttaaaaactgactagatggcactcgattagctagtaaattttctcctagttcttgtttactcactttttcaaaccattcatcaagagaatcaaagttttgtaaagaactacttccatgtggttgttcccctgagtgtaaaaacgcttgtctatacgccgtaatacgctcactatattcatggattggttttaatagtttcattgttcttctccccctcttcattccataaaacaaacaccttaatagcagctattcactattaaggtgtttctatcctttttattcaaataaccccatgctcaaataacgttcacctgtatcaggcgcaatacataaaacttttttaccaacgcctagacgtttcgctatcatgattgcagcgtaaacagatgctccagaagatggcccaactaataatccttcttgtctagctaagtttctcattgtcgttaaagcctcttcgtctgcaatttgaataatttcgttatacacttctgtatttaagtttttcggaataaatcctgggcttgttcctactagtttatgaggacctggtacaccaccggataaaacgggagatcctttcggttccactactgcaatatataagtttggcaatttctcttttaacgtttcaccagcccctgtaatcgttccgcctgttcctgccgttgcaacaaaagcatcaagctctccctccatttgttcgtaaatttcaagtgcagtcgtataacggtgaatattcggattagctggattttcaaattgttgcgggataaaactattcggtatttgtttttgcagttctaacgccttcgcaattgctcctggcattctttgttctgctggtgttaaaactacttctgccccgtatgctttcaataaattaatacgctcttttgacatattgtctggcataattaaaatcgctttataccctttagctgctgcgttcatcgctaaaccaattcctgtattcccgcttgtcggttcaataattgtatcccctggtttaatgagaccattttcttctgcaacgtgaagtaaattataagcagcacggtctttcacactacgtgatggattaaacatttctagtttcacatacacgtccgctgcgtcttccggaataaatttagataatcggacgacaggtgtatctcctattaattctgttacgttttcacataatttcatagtgcatcccctattctatcgttttcttatcacttggtaataaccatgaagtaagtccaattaacggtaaacaactacataatatcataatgaactgaaggctatatatatcagctaactttcctagtactacagcacctagagcaccaaggccgaacgcaagacctacaattagacctgataccatccctacttttcccggaacaagctcttgcgcgtatacaacaattacactaaaactacttgaactaataaaaccgatacataaaaataaaggtacgacccacacaagtgagacatgtggtaataacagcgcaagtggcgctgaacctaacattgaaaatacgatgatgtttttcttaccaaatcgatctgctaacggtcccccgaagaaagtgcctaacacaccagcaatcataaatgcgaatacgaaatactgggcattttttatagataaaccataatgctcaattaagtaaaattgatagaaattcccgataccggcaccgtaccaagagcgcacaaaagtaagaaaaacaagaagtataataacaaatttaatgtgtgtacttacaattgcattttccgcctcaagcgcagctctcttcttccttcttacagcgccggttgctaattcatttttgtaccaattcgatacgaaaattaataatgcaattcctactgctgcaaatgctgtaaaacctaatgaaccaatttgaccgagtggaacgaaaattagcgctgtaaaaataggagctaaagaattccccgtgtttcccccaacttgataaatcgcttgcgctaaccctcgttttgcacctgccgccatatacgcaacacgagcgccttctggatgaaagactgcggaacctaagccaataaataaaacagaaataataacaataataaagtttggtgcaaacgcgagtccaatcattccaagcatacttgaaaacataccgagtggtaataaaaatggtgacggcttcttatctgaatacataccaaacaccggttgcataatcgatgacgtcatatttaacgcaaacgcaatccaccctacttgcatataggataaattcatcgttttttccaaaataggaaacaacgccggcacaactgcttgcatcgaatcatttaaaaaatgtccgaaactaatcgcaaataatattcgatatattgtcggtgtttctactgtgtttttttgtgaaactgcctgcatatgtgaatcgctcctttctgtacaaaatatatatttattacagtaggtgtaataaattctgacttttgaaacatttctattctatactgctttcatttctttttccagaaatataacttaactcccatcattgacttgcatccttgtaactttcagcagtaaaacattatagaaaaaggcaacccaatcacaaactgggttgcctcttacattaaattgcaaaacgcttatacttctcataatcgctcgtcttacattccacttctagtttcgtaccttcattttcataactcgttgataaaacgtgcgcatgattattgaaatacgaaactacctgtccgtgatcatacggaattaacatttcacatttcgtatattctttataaatatgggaacgaatcatttctacaagctcttcaattccaacatgtttcttcgcagataaatacacgcggtcttcttgtactttcggaatttcaacatccaccatatctgatttgttataagcatagatcgttggaatattttctactccaattttctttaacgtttcatttgtaatatcaattaattgttcataatttggatttgcgtaatctacgacgtgaataagtaaatctgcttccgctacttcttctaacgttgaacggaacgccttcacaagatgatgtggtaatttacttacaaatccaactgtatctgttaataaaaatgatttattatctggcaaatcaatatttcgtacagatgtttctaacgtcgcaaataacatatctttttcaaatacttgtttttcttctgtaccattataaatttcaagcattgcattcatcgtcgttgactttcctgcattcgtataacctactaatgctacaacaggtatttcatttttcttacgttgctttcgctgcgtttgacgctgggcaacgagcgcttctaaatctttattcaaaactgaaatttgttcttcaattttacgacggtctaactctagcttcttctcaccgacacctttatttttcgtaccaacgccgccgctctgtctccctaacgattcacgaagaccaattaaacgaggcatcatgtactgaaggtgtgctacttctacttgcagctgtgcttctttcgttttcgcacgttgcgcaaaaatatctaaaattaaaatggtacgatcaatcaccttacaatctaaatcctcttctaaatttcgaatttgtgaaggagataattcatcattaaagatgaccatattcgcatctatttcttgtacatacgctgctacttcttcaatctttccttttccgatataatgcgatggatttactcgttgtaaattttgcgttacttgcccaattacctctacatcacaagcttccgcaagatttgttaactcttccatcgaatatgcaaaatcatcttcattacctacatttactccaactaaaactgctctttgtaatacttcttccatatatttattcctccatttcgattacgtaaaataaaaaacacaggtcgctgcctgtgttttcgtaaacggataagggttcaccaaagaaatagaagaaagctatgctttcatcctattttatagtcaaaaagtcccaagatcgtatacgtatacacaataagcgttcacctatacaatcccattctatttataaaggcaaaacaaaaagagggcgtattcgtccctccctctttttcacatataagcttaataaagggttcctttaaaataggcagaccaatcccgttcactctgtacacagacagagcctttgagcgctattcaattattggcacaaagtattgagacgtaatctgattaagatcaaaggaagcccctccgttcattttaagttacataaagtgtagcataagtaattcgctttcacaaggtttaacaacctatatcacactaaagaaaatcgttatttttttactttaatcgtcattttttgcgagtttttctcacaataaaaataacaaaagcaattatcaattttagaaacttctcgtatattatttttacagcactcgccaaattccttcatagtaagttaagtattatcgttttaatacaacaaaaatctatattgacatttttataacctaatattagtatcaggttataaaaataaaaattaggagatgttcctatgcattctaaatctcgtattactgcaattggtacttatgttccagatcaaatattgtctaataacgatttagaaaagatggtccatacgaatgatgaatggattgtacaaagaacaggaatgaaggaaagaagaatcgctagcgaagaagaatattcctcaaacttagccattaaagcaattaaaaatttatgtacaacatataagaaaaacttagaagatgtcgactgtatcattgtcgctactactactgctgattacgttttccctagtgttgcttgccaaatacaacaatacttcaacatacctcatacactagcttttgatttaaatgcaacttgtgctggttttacatatggactacacgtcggtaatagcttaatcacttctggatcacatgaaaaaatacttgtcgtagcgacagagacattatctaaagttactgattataccgatagaacgacctgtattttattcggtgatggtgctggagctattttattagaaagagatgaagacatcccaagctttatcgctgctcacatgggaacaaacggtgatggcggcattcatctatatagcacaaacttatctactactatgaatggcacaccactgcaaacaaatgaaaaaatcgttcaaaatggaagagaagtatataaatgggcaacacgaacagtgccaaaaggcataaaaaatttattacataacgcaaatatgcaaggggatgatatagactggttcataccccacagcgctaacttacgaatgattgaatctatttgcgaaaaatctcaaattccaatacaaaaaacattaacgagcgtggaatatatggggaatacctcttcagtcaccattccactcgctctagatttagctataaaagaaggaaagttaaataatggagacacacttttactatacggattcggtggtggtcttacacatttagggcttattgtagagtggaatttaatttaagtgtataaaaagaggctctagtcagtaactagaacctctttttcatttaatttcttgccccttttcgagaccatatcacaacaggaataagtaataacgctaacacgcctccagccaatgacaatgccgcataacttgaattcgctactaccatacctgacatcgctccaccagaagctccagctagcgcaataaaaacatctattttcccttgtgttttagcacgtgtagacggtgttgtggaatcaacgatttgtgctgtaccactaatcaatccgaggttccatcctagcccaagtaaagacagagcaacgattaatagtaataaagaatcacttggcgctatcgcagctatgacacccgctgcaagtaaaatcactccaccagctatgctcattgtagttcggccaattttatcaattaacattcctgtaacgagagatggaagatacattgcacctacatgaaaacctatcacaagtcctactgcacttaaaccgtgaccgtggtgtcccatatgaactggcgtcatcgtcataatcccaaccatcacgatttgcgtaagtatcattacgattgctccaactgtaatacctcgtttattttctttcgcttcgtctgttattggttgtcctttatatgtatgttcctgtttatatctttctattatgttagcaataattaacggatctggacgaagcataacaaaaagaactagacccgccagtataaatgctgctgccgatagtatgaacggacctgcaagtttaggaactccaattgaatgcgcaaaactacccattactcctactaaatttggtcctgcaactgcaccgaaagtcgtcattaccatcgtaatactaacagccgttgctctctgcttcttatctgctaaatctgtacctgcataacgagcttgtagattcgtggctgtaccggcaccatatatgagtaaagaaataagtaaaagaataatgctattcgttaaagctgccattacaacaccaattgctccaaatccacctactataaaccctgttgcaagacctatccggcgtccatatcgttgcgaaagcttccctactatgaaagctgctaatgctgatcccaatgtaaacatagcagttggtaatcctgcaaatgcatctgttccaagcatttgctgcgcaagaagtgctcccactgtaataccagcagctagtcctgcaccgccaaacatttgtgaaatgctgacgattattaacgttcgtttgtatagtttttgttgctcttcttctgtgtacacatgattatctattaaagcccctgccttatctagcaattccccatcctccttttaaaattaatccctcttgttaatgtactatgtataacgttacatattcaatggcattttccattcatccctttcattctaaaaaactttctaatcatactcgacttatcccatgctatattaaaaatactactattcacaatatgcaaggagaaaacaatgaaaaaacaggctaatagcagcctgtttccctttacacttcttctactatccttccccttctctttttactcaaagctcttccttcccaaaacaacaaacttacgaaagcacaaattaaaataattggcacacttgctttatataaatctgtaaaactcattgccatctgattcttggcataatgattcacatcattcgaaaatgtgagtacctctttctttatactttcctcttgtttttcaacttcttttgttacttgcctcataacttcttctctttttacatccctatattctactggaacttttcttaatatttcatccgtcttgtcgcgaatcaattcttcctttttctctttacttaatcccattgtcattgcattttgtttcttatttatattcgactctaaactttgattctctattttttctttagtcatttgtaaaatttcagtttgctcagtactattcacatgaatattccgcaccttttcttctgcataatgatatactttttctttatttatagttaaattatgagttaagttagagacaaatattgcgaccgccaatacaattccaacctgtcgtaacattgatacaacactttgagaagcagttaataattctccttcaaacgaagacgcacttaaaactgtaattggccccactactaagccatatccgacacctaatatcatacatggaataataatttctatatttgttgaatgaacatcaatcatttgcaaccaatagtaggaaagccccataacaagaaatcctgacaaaataatagttacttttccgagttttttaattaaagttgctgcaactggtgagacaaaaaatatcatcgctgaaataggtgtcactaaaaaagccgcttcaatttccgttcgaccttgtagtttcgtcaagaacgttggaagcaatacagtaactccaattaaaaataaattactcaatataacaacgattgacgctccgacaaacattcgatcttgaaataactttaaattcaccattgggttatgaatctttcgttctactaaaataaatagaataagagaaatagtgctaattgcataacaagacaaagcaatattactttgccatccccatgtattaccttttactaatatgagagtaaatgaaaaaattgctgtgctacttaatagtagtcctatccaatctatttttgagataatacgttcttcattttttatttgtagcatgatgcaacataacacgattcctattatacaaaccggaacattaacgaagaacacccatctccatcctaaattttgcgtaataattccacctattactggccccatagcagctgacaatccttgtgttactcctaaaattgcaagtgcaacatgccttttagctaacggcatagctgatacaccaattaccatacttgttggaaataaaattgctgccccaatactttgtataaaacgagaaaaaataagaaaatcacctgtattagcaaaagcgcaaagtaccgatccacccccaaaaatcaccagaccaagaatatacatctttgcttttccaaagatatcagctatccgccctaacggaatggcaagtactgcaatcgtcattgtataaacatttaatacccaagacatcttttctaatgaagtatttacactcgattgtattgccggtaaagctatattcataattgtcgtatcaatcatacaaagaaagatacctagacacattaaaaagacaatcttaataccctttgattgctccatctttatatacccctttatttattgtgaatgcgtttttcactcttctgttttattgttttctttcgcctctaactcttctaattttttcttcaaagtctccacttgtgcactatacgatgcaatacctacatctagtgaaatttcttcgacgaaagtaatacctattctccacttttcatatttcaatcgaagatctgcaatgtacgcttcttttctttcaatttcatctttaatccatttttttattgttacatcatcactatagttgccaaaatacattctcattaaaaaatccgaacgtaaaacatccttctctataggcgtctgcatgtattgataaaattcttcacgcccctcatctgtaataaagtacattttcttattcggttttccctcttgcatgacaacctctttttttattttcccttcattctccaattgccgtaatgttggataaatcattccaaaacttccatcaaaaaaatgagtaaatacgtcttcaaacacaattttaatatcgtaaccagacaattccttttccattaataaacctaaaacaacatctcttcccttcaaagtaaaacccccacatagtatataatcaataatcatattaacattgttaatatgattattgattatataccttattctgttaattgtaaaatgtttctaaataaaaaagccccataatttggtttcaccaattcacagggccattttcttatttactctttaacacctacaccttgcaaaacttcaatatcctctttcatttcataataataagaaggcaattctataccatgttctaagaaataatcctcaatgaatgaaataataatttttaacgttttcacacgagcatacaatttatcgttactttcaataatatgccactttgcatttggcttacttgttttttcaaacatgtcttccattgcttcaacatactcatcccatttttcacgattacgccaatcttcgtctgtaattttccatcttttcaaaggatttttctctctatctttaaatctctttaactgttcctctttacttatatggtagaagaacttccctattatgtaatggtcatctgttagtagtttttcaaaatcattaatctcatcatatgctctcatccactcttcctttgtagcaaatccttcaacacgctcaactaacacacgaccgtaccatgagcgatcaaaaatggtgatttgcccgtactgtggaattttgcgccagaaacgttgcaaataatggtaacgtttctcatgaggtgcaggcgctccaattggatttacttggaacccacgcgggtcaagatgttccgtcacccgcttaattgccccacctttaccagccgcatcccatccttccataacaagcataaccgcgattttttcttctttcaaaatttgctgtaatgctaataagcgcctttgatatttttctaatttcttattgtacttagattttgattcaatttttttcgttaagtctactttagcaagatgtccattttccataaaacaaatcccccttgttgtatgacaatgttattttaacatatttttggtaattttttcatatcctaaaaaaactgtgtagaaacatctctacacagcttccttctctaatttcacatatataagcacatttaactacattaaaataaataatttatactgaactcttagtatattctttttattaaaacgtaaaaatagtccttttaaaaagggcagcaatctaagtatagaaaaacaaatttattcttttttactacatacgtaattatgccggctataagagtattgaataagatattgattcactactcttatagccactttacattatatggtatatttactcgtaaaaagaagataataacaagtaaatccattaaagaatgggagctctaaaaaaatgaaacgaaaaatattaactctctttacacttttatgcttagcactaccaatacaagctagtgcttacacatttcagtcactaccgattgcgtcaaagtctaaacaatggtatgtcgaaattgataaatctcataactcaaacaagcaagcaatccagccaaagcaaggtgtatttgatacgtatagtttactcgtaaaaaacatcggtcatgatgtatcaaacgtatctgtggaaatacttgataacaaccctacctctaaagctacctttaaacctactacacctaatgaaaatatttctaaaagtcatacaagctttgactacatggtattcccattagactttaatagtcataattttaaagttgtaatcacttgggaagaaaagaatttctcttacaatggccatccggtaaatgaaggtaaaaaaatgaaacaaacatttgtatttaatgaagactaagtcctaatttctttagggcttagtcttcttttttgaaacctgcttgtatcgcttccgtcacttcttttgtgatttctaattttgttgtgccaaatatgtacggacagtttttcattacaaaggtgttttattaatactagttgattatatgctaagttattttctatataggtctagccctcttttcccatataatcaattaaatcgacgaatactctgtacagacaatgctattccaattgttaaaattactaaactagctagtgttataatagttatttcgccacctatgacagtagctaaccagcctacaactacataccctaatggcaataaagcaaaagaacccaacatatcaaggcttgccactcttccgaatgcttcttctggtacaaactcctgtaaactcgtttcccaaatgagtccaaatatcatcatgccaaatccttcaattgccattaagaatattaaagcgggtgcccaagaaatgaatggcataattaataaagcaatgccactcattaaaacacctccataagccagtaatcctctcttatgccaccgctctttcccaccaaatattactgcggcaattatagccccaccaccagaaaaggccatgccaagcccatacacgtaagcttcaaaatgatgatgaacattaaataaccatggaattaatacgacgataatgccggcataacaaatatttataaaagaaaaaactaaaattgtaatccacagccacggatgactttttaaaactaaaacaccttccataaactcttgtttgtaagtaagcttactcttttcaatgggttttacttttttaaacttaatttcttttaaaaataataaacataaaaatgataataagtacgttgctgcatctagtccgaaacctatccctgcagatgcaaccgatacgattaacccaccaagtgctggcccaatcaatcgtataccttgattactcatttgagtgagtgcgttagctgcattacgaatttcaggaacgaatactttcgcccttacagcagaatatgctggttggaatatcccttccataagtccgtatatggcaacgagaatatataaaatcgtaattgttaataaatccataaatataagcgatgcaagtaatagcattaatatacagcggattatatccgtaaataacattaatttaacccgatcaattcggtctacaactaaacctgcaaacggtaaagcaagaatattaggtagcatgtacattgccatcgtcatccccattacaactgttgagccagttaatgaatacacaacaactggaagtatgaccatagttatcgaactacctaaggccgagagtaattgtccaatccataaaaacttaaagtgcgttgatactttaactggtaataataattttccaatataacttaaacttttctccttttgtatttccccttgcatgtctctctcctcttttcaaatgactatagaatacataatatacgactgaaaattcataatattatatttccaattatataagaaaccattatgttatggtaaaattatcaaaaaaatataaaggagaatgcatcattatgcctccaaattcacataacatcgaacaccaaatctatacaatgtgtatgatccagcgcaacaatgaagttttactcgtaaaacgacccaatcatcgaggtttccctggctacatagctcctggcggcaaagtagattttcccgaaagtatcgttcaagccgctataagggaagtaaaagaagaaaccggattacttgtttcggatttaaattttaagggattagatgaatatgtaaatccgaaagggaatgttcggtacatggtatttaactactggacagactcatttgaaggtgaacttcttttaaacccacctgagggcaaattattatggataccaatcgatacagcactaaagcttcctatgcaagattggtttaaagaaagattcccattattttttgaaaaaggcacctttgaaattcaacgtgtttgggataatgagctagataaacaagttgctataacaattacacatacgtaaaaaagcttggaatctctccaagcttttcttacttctcctgtactttcttaatcttataatcaatttctaaaaacttaactccaaatatccacattctatgattagcttctagtatgtgatccgtgcgctcttttataataaaagtctctgctaacggtaaacggattgtcaagaaccgagtatgtaaataaatcccctcatctccctgaccattttctcttaacttactagtaataattaaatcatgactatcattatatagtttcaaaataccagtcatattcgaataaggtaaaggtaaggcgatattcatatatgtctcactcttatttgtatgctttgaataaagagctacaaaaatagatttacctgcttcattttttcttagccaagcccttacattctctcttccatctttctcatctatgacactaatgatagagccatgcatcgtttcccaattgccgcccattcctaaatgtatttgttctacacgcttactcattttctcatagcaaagtgcgaacggacggaaccaacgagcccatttaatattcgattgcaattcatactctactgtattttcataaaaatgaataatacttaaaggaaccttcgtcacatcaaatgcctcactatgaaagtcatttactttatcaactaaaccgttgtattccttactgtctactaaattgctgctatataaataagcctcaccaattgccacatttcctcttaacttactcattggtttcccatagtatttataattcggaacactcttttcaatcacccagccgataaatgccggtaacgctactccaattccgttgacaacaccatgaatccaaaccatttgagcaattgtaatcgtcaagacatgcttcaaattcccgtatgaatatataagtgagaacataattgtaaccatgagtgtactagacgaaacgattagaagaatctttgcactgatagcattaaattttgctctccaaacgtaaaatccatacccataaattgcacataaatataggaacactgcaaaaaattcaaatattcttgagtatgtaattcctattgcaactgtcataggtgaaatcatgatgataaacataatagcatcatacactttacttctcttttctctttttctccctattaaaccagctgataatggcaatagaaacgccgaataatgaaaatgtgcagctgtgagtaaaacaatgtcagagctaaaatgcataattgaaagttttgctactgaagcagaaaaccaaaaaccacctaaaaacaaataaataaacgcactatctatggcgatctcttctaacggcttccatcctctttctagcaatctacttacaccaaataacgcaacaattcctgtatatacaaaccaaactagcgcaaataaatagtgatttgtgacgaaagctaacattgcacaaattgctgcgattggatataaaaatgatacggatttataaaataataattgcgatccatctctttttcttttatcaataatacaaaatgacattggtataaataataaaacagataataatataattgcttcaacaggatttatattcgaccactcacttattagaaaaacaacatagcaagcaagcccaaatattatatttttcatatcgtctattccctttccacaaatgttcccttatatgaaaaaagcgaaccaattaacgggtttcgtacttgtacatgaattcgaaaacattgtagtgtttcatcataactttcaacaatttttgcctcaccatacaaaaattttggtaacggcatttttcttccaaacatataaaaccattgtttctttgaagaaatatgcattgcccctaactcatcgatatgaaaatgcagtgtagaaacgagtaaatgtggttcaccaaaataatctacaatttcattttcgttttcatcaaactgcataactgcattaaaatatcttttcttatttcacctattgattccccttctccaactatttcaagcccaaatccaatctttgttttatacaaaaacttctgtggttccccttcttttttctctaaatacgaaatttcagtaaagcgagcatcccactctgtatgtatatctggttcttgcgtatattcccataatttttccatcgtcgtgttcatttttgtcgcaacataaataggctgtttccttttcattctccccacctcctatgcactataactttaatgtacatgcaatgaatttattttgctacatttttcacaaacttcctcagaaaaaagaaagaatttttaaaatatatataaaacacttgattccacgaaaaatttaaattattataaaacaaatgttaccaacaacttcataaatcaaacactctcgcctaaaacgtgagatagaggttgcgatacttatgagtattctaatggagacacagagatgtctatgaacttagatgaaaggaagtattgccgaaattgataaatttctctgcatttatcaattggggctgttttcgaatagaaacagaactgtcatatgtacagacgtgtacgtatgaagagctatctacaaaaaagagatatcatttttttatgatattccttttttggcggtttttttattagctccgttttctgtttcccttttcctgtaacagcaccatcctcacttatttgagatggtgttttttgtttgtctttctggtaactacaggagtattggggatttatatatttcctaatctattcttaaaaatagacgaaagaaggaatttgtaatggaaacaattgttcaaaaatttggtggcacttctgtcggaagcgtcgaacgcattcaacatgtagcaaatttaattattgaagaatatgaacgaggtcatagcattgtctctgtcgtttcagcaatgggaaaaagcacagatgaacttgtcgcactcgctaacgctatcacagaaaatccaagtaaacgtgaaatggatatgcttctatctacaggagaacaagtaactatttcattattaacaatggcactgcaagcaaaaggctatcatgcaatttcattaacagggtggcaagcaggtattacgacagaatctgtacatagtagtgcacggattactgacattcatacagatcgtattcaatcttatcttgctgaaggtacgattgttatcgtagctggtttccaaggtataagtgtagaaaatgaaattacaacgcttggccgtggtggctctgatacgactgctgtcgcattagctgctgcacttaaagcaaaaaaatgtgatatttatacggatgtgacaggtgtatatacgacggacccacgagttgtaaaagatgcttacaaattagacgaaatttcttatgacgaaatgttagagcttgctaatctcggtgctggcgtattacacccgcgcgctgttgagtttgctaaaaatcataatgtagttttagaagttcgctcaagtatggaacaagaaaacggaacaattgtaaaaggagaatgtaacatggaacaacaatcaatcgttaaaggtattgcatttgaggataacattacacgtgtcacaattaaaggattagaacaaggctcgctttcaacagttttctctacattagcagcagcacacattaatgtagatatcatcattcaaagtattacaaatgaaggaactgtacacctctccttctccattcattcgaatgatttaagagaaactttagaagttttggaacaaaatcaagaaactcttcactatgaatctgtagaacatgaaaatcacttagcaaaagtatcaatcgtaggatctggcatggtatctaacccaggtgtcgctgcaaatatgttcactactttaaaagaagaagatattcatattaaaatggtaagtacatcagaaattaaagtgtctgtcgttattgaccgccttcatttagtaacaggcgttgaggcgctgcatcaatcatttatggcgaaaattgagcctttagtgcaaatgagctaatctgatatatttagtaatgctaaaaaaatcatattaatgtattaccttcctattaaataaaaagctgttcgttaacacgatgctatatgacatattaaaaaacaccttgtcacattttcctatactgtgacaaggtgtttttgactgaaaggaatttgtaactacttagtagtataattatgaggataattaaataatagacttttatacataaggagataagactatggcaaaaaacaaattactacgaatggacaatgtcagcatcgttgtagaatcccttgataacgcaatctctttctttgaggagattggcttgaatctcgaaggtcgagccaatgtcgaaggtgaatgggctggtcgcgtaactggactcggttctcagtgcgtagagatcgctatgatggtcactccagatggccacagccgaattgaactttcgcgatttctcaccccacctactatatcagataaccgaaatgctcctgtaaacgccctcggttatctacgcgtcatgttcaccgttgaagacattgacgaaatggtatcgagactcactaagcatggtgcagagctcgttggtgaagtagttcagtatgagaactcgtatcgtctctgctacattcgtggagtcgaaggaattttaatcggtttagcggaagaactcggtaataaataagtaatattttataagaagtctttactaaagtaaaaatatttgaaagaaattctcgcttcataaaacttagattttgaaccccgtcctagctttagaacggggttatgcttgtttgaactttttaacacactatcaacatcctaaaatcattataaaacaattcaattacttcttatactctttcctaggaaatataactgattcttctcacctcttatcatatatatcttttcttttaaaaaacgatctgaactcattcaaaataactttcttcacgtcagagtaaaaaactatcatgaatagtgctattcctaataagatttcttgcattccttcataatcaacgaaagcacttaaaattagcaaaccacatccaatataaaaaccaaattcatttcctttctcaaaatcctcatcttctgcatcactatgtattttctttttgaaatcttgattcccttttatcaactcatctagcgtaacattatacatttcgctcagtaaaattaaattatcaatatcaggataacttttatcattttcccatttatatatcgcttgcctcgttacaccaatctttttagcaacatcctcttgtgaaaatccctttgactctcgtagtttttttaactgttctcctaaattcataacgtcccctcctttaacaaattattacataaaaagagatataaaagaaagaaaccattagtaaaattcactgtaaaccattcgtttacacaataaaaagagaggataactctttgagctactggtattatcccctataggtagaaagtaaaaaaagagtccatctgatatgatggactcaatactgttttatctggaggggatttttttatggcaagaaaagttcttttgaagaaaatttagccataaaaaatgcacctccaattgttagactgtgtctaacaattggggtgcacttcaattagtgaaacggcttttttttaagcgttcaattctgttttatacccttttactgcactacgtttgaatgcagttgctaatatagtaaccatacttactataccaatccaaacgagtacagtaacaggtgtattccagcttaatccttttccgaagaagaagatttctcttaagccttcaatcataaatttcattggtaaccatgagtaaacccagtcttgataaaacggagacaacatctcaggtgctaacgatagtaacggcgccccgaagaatagtaataaagcgaataaaccgattccttttagcccaaccaatgaaagtaccgcagatatcattaagaagaaactaaaagaagtaatggataagaatagagctgtatccgtgaagttcgaaatatttaaccctaccatcccatccgcaatccatgtaagaccaaatccaattacaagtgtcgcaatagctcctgttacgatttggtttacttttaacagaaagttttcttttcttgagcttactggcattttactaatcgcaataaaaataatcgctgcactagctaaacttgcaatccataacggctggaacaatgatattggtgagttaccgttcgcactatttttgccgacctcattcatatttttcacgttctttacaataggtgttactaatttcgcagcttgatctgttgttaatgtacctcctttttccttatatccttctaatacttgcgcgcgaacagtattgttcatattatcaacaatcgcctgtaatatttgtcctgccatagttgatgcagccgtattcattccttgattaatatatatttctatctcaggtgaagatggctgtggtgttcgtaacgacgcttgttttgcgctaaattctttcgggatgactaatgccgcgtaatactctttattgtttaatcccttttgaacggcttctttattttttacttctacccacttcactgcgggttcttcctctgatttcgctgtttttttcatgttatcaacgatcgtttgccccatattcattttcggttgatttggaatttctacaccttgatcctcatttacaattgcaattggcaagtttttcggctttggttgaacagttggaaataacgttaatgaaaaaataaaaacaacaagtagtgcaataactggtgataacaataaaagtttatttttaaacattttcttttctcctcccttaatttgatctataataaccaacaacgtgttgtttatttatattttgaattatatgttcgagttgaaccttatacaataatcaaaaatcgtgaatgtgttggttataagacacattttctaaatgtgttgagtaaaattaaggagggatatgctttgcgcgataataatttagatttgcgtgttgttcgtacaaaaactgccatacgaaatgcattggtggagctaattgaagaaaaaggttttgacgccattacagtgaaagatattacaacgaaagcaaacattaatcgcggtactttctatgcgcactatcaagataaatttgatttaatgacaaaatgccaagaagacattatgtacgagttttctaacattgctaaacagaaattcccagaagttattgctgaccttggatcaaatccttctccaacaatgccatttatacttatcacttctattcttgcatttctaaatgaaaatagtgattttatgagagctgtactaagtccgaaaggagatttatctttccaaacaaaactgaaagactttatgtggaaaacattatttgaagatacgaatggtcctctcattaataaggagaatttacttgttccaagcgaatacttaacttcttatatggcatctgcgcatataggtgtcatccaacaatggttaaataatggacaaaaagaaacacctgaggagattgctcgctttttatcaacaatcgcagttcatggacctttttatgcggctggcttaaagaaataagtcagctatataataaaagaacatccactataatagcggatgttcttttatttcattacaacacttcaatatacccttctgttccatgtacccgaattcgttgtccgtcttttattaatttcgtagcattctctactccaacgactgccggtaatccatattcacgtgcaattactgctccgtgcgtcataagtccgccaacttcagtgactaacccttttatagacacaaacaatggtgtccagcccggatcagtaaaagctgtaactaatatatcgccctcttctaaattcgcttcttccatgtttaaaataacgcgagctctcccctcaatcactcctgaagaaacaggcaaacctacaatcgcatcatctgggaggttttctcgtttatatttacctgtaatgatttctccatcagacgtcattatacgaggaggcgttagtttttcatataatttgtaatcatttttttgtttttgtatcagttcgtaatctagtttattcgtgcagactacttcgtgaagttcttcaaaagttaaatagtatatatcatccacttcacgaatgacaccgctctgcacaagttgctcagcttctttcagtaacgcttgcttatatatgaaataacgattaatcataccgtattttggatattcacgatagccgataaaattacggatattacgaatcattcgcttcgtttcttctactttttgttttccatccgataagtgctgtaatcgatctactaactcttcttcttttttcaaagcttcttgcagtccttcttcaaatttccgcttactcgcaccatattcaaaatctcttatattatttaaaatcatcgggataattgtagttggcttttcactccagcgcgttttcgtaatatctatttctccgctacatctcattccgtatttatttagaaaagttagaatagcatctcgagcttcttctccacccttaaactgaactagttcatttaaaaagctatcatcttctacatgttgtaaatacgtaataacttctttgtacggccgaatcacatcagcgacatccattaatgctaaacccatttcagatgtaatattattttgtacggattgagaaagcgtgtctgctgcatttttttcacctaaccattgctccatcttttcatttatccatgttgaagcattcataccagccataatgacagcgatactttgcgggttaaacaatactttctttaattgctgaatatcttccaaaataaaatcaagtacgtccactcctgatttcagttgcatattttgttttaactcttcaagtgatgcttgactattctgtattaaatttgtaacgattgccggatcattttcaatttccggttgagaatttgcaggtggcacacttttaccaacactcttccctttttcatcatctggtaataatttaataaaattatctcgcttaactatagtcgttaatgcatctcttacgagtagatccgattttcctaaagtgtttattaagtaatctctgctagcaggtaaagctaattgttgcgtagcatcgacaaataacctgcctcccgctttacgcataggggcactagtcgttaacaggaaaaaagataaacctaatggtttcatcgcatcggtcatcatttgttgatggccaaccgatatatacacatgatttccctcatcattttcttcaggaattggatataaagtcgtaatggggcgactttggactatataaattgtatcatcaactaagcaccattcaatatcttgcggacaaccaaaataagcttcgatttgtcttccgatgcgtactagttgtaaaatctgttgttcagtaagtgtttgaactttttgctgattaggagcaattttctttctctctgttccgccttcttttcgtccatagatggctaattttttcattgcgatgaccttttcgacgatttcatcttcttttaccttataattatcggcagaaactaatccagatactagcgcctcgccaagtccaaagctggcatcgattgacaacaccttcctatttgaagtaatcggatcagccgtaaataaaatacccgaagcctcagggaaaaccattttttgaacgacaacacatatagaaacttgattatgttcaaaaccattttgcatgcggtacgtaactgctcgctctgtaaataaagacccccagcactttcttacatgctgtaaaatcgcttcttctccgataatatttaaatacgtatcttgttgacctgcaaatgaagcatacggtaaatcttcagccgtcgcactagaacgcacggcatacgcatgttcatttccaaaacgtgagagataatgagttactgcttccactacatcagaagggatttctactgccataattacttctctaatcttcttactcatttcaccaatttgagctcgctcttccattttcaactttgttagttgctgcaacaaagcctgaagctcttcattttgctcgatagccttttcatatcctaccgttgtaacacaaaaaccttcgggtacttgtataccttgaatgtttgttaactcccctaaattcaaaccttttccaccgacgagcgaaagctgcgtgttttctatttcctgaaaatcgagaacgaaagaactcatataacatctctccttactatgcatgtgttcttgattgtagcaggagtcaatacgaataaacagtctatttcgaacttgatttacatgatataattaagttaggaagagataactatttttatttctccccctctaatccacttcaattacatctccaaacttaaacattctttgattatgaaaagcatccgtacaagtaatcgtcttatttaatggatttatattagctactgttatgtaatttttatatagatagccattctctaaaatttttatagtgtaatccactttcaataaaagtcaaaaaatatgttcgtcaattaaatcttcacaaatatttaatgcttataaattaatattcatctcatatataagttctaagaaatttagataaaaaagacattatttttgatgatctaaactaattgaaactttaattaaattatatatctataacaacatagagcaatgtcataacgaattgaaaccgaaagtttcttaaagtagaaaattcggcttcttttatatcgaaatttgcttagcgtatattttcgttaaaatgcgggtagtaccccatcgctattgagctaagctcatacaccatcaattatagtagaggctacgtgtaaagaatttaaagacccctcagggatcaatgaattcctgaggggttgcctacgtgatataacatatttacaattatgttacgtttaaaatacgtatctttttcatttaccttataaccaccctatttaagtttataagaactatgcttttgagataaaagtcattacttgttttataaactcgtaaccaaaataaccactaaatccgaataggactattgcggcaaatatagatactcttttaataaaggttggatttagaaaacgtctagtaaaatgaacaaagcttaataagatcatatcatgcataaagatacctaataaaatacctacagctattaatataaatgtagatgtacttgcattacctaatgaagaaactagaaccgggccaaagacccctatccaaaatacaatattagccggtgatatagcaatcataaaaccagataaataagctgataataaagatttattaggatcttctccatctatgttaacttccgactttgcttctttaatgctttctattccaataaacattaaaaatataaaacctaggagccacataactgtttctacccatggattggttaatacactagagaaccctagataaatcaggacgattaaagataaatctacagtcattcctcctatacctacaaaccaaccatgtacgaaaccatttctcattccttgtttagtcatttggactgtcatagcacctgcgggtattgctaaagataaacctaacaaaatatatgtgaaaagtgttataatcataaaaattctcctattataagtattgtaataatcaaaccctttttctttttcctcgggttcagcaaatagaactacagcacggcgacttttcacattacttctagcaagcatcaaaaactcataagaagataaatgcctaaaatcccataagatcctttacatgttcagcattctttttagatgttaatttttcaagtaataaaaacgcaacatcaaaagctgtgcctggatttgatgatgtaataatatttccatcttgtactattaaatcattttgtactattgcaccgaaattctttaactgctcttttcgtttactcgtcggatgactgtatgtggtagcttttttacctacaagaattccactttttccaagcgttaatgatgcaacacaaatactggcaataggcttctgcttggcataaaaatgttgaataacatgtaagaattctctactgtatgcatcccgataaaaaccagcctcttcaaatcctcctggaatagctagtgcatcaaattcatctaattgaatatcatcaaccgttttttccggtatgacagtgaaattccaagtacaagttaatttattccgaagaccaactgttacgacctcggttgatccatctccctcccatttattccagcctagtacatctgtaaatacactagcttctactgcttcaaacccgtcagctaataataataaaatctttttcatatcgtaaaccgcctccttctacccttattttatacaagtatagaaggctgataaataagttcaataaggatatttgattgtttttctttattttataaagaatttaagttattctattttataaaaaaaggttggataatttatggatcaaattgataaaaaaatcgtgggactattacagtcaaatgcaaaaatttcaatgaaggatttagcggaagcggttcacttatcttccccgtcagtaactgagcgagtacgaaagttagaggaacaacaaattattgaaggttaccatgcacatgtttctctaaaaaaaataaatcgtccaatttctgcacttatactgtttaaatcaacaaattgtaaatcattatctaacttttgctacaatcatccagatgtacttgagtgttacagagtagcaggagaaattagctatattgtcaaaatagcaacacattctgtagaaagtttagaacaatttattgatgattcaatgcaatatggtacgccatcaacgaatattgtgttatcttcttatgaaaaaaagataattactccttttattagtgaagaataaaaatacgggcataatcaattaactattgcttatgcagaaggataatttttgtatgttatattaaaaaataaagacgttatatttttttaaaaggagtgtaattacaatggatttttctaataaattagtgatcataacaggggctggaaatggaatcgggagaggaattgctttacattatgcagaggggccaatgttattttagcagatatagacgaaaaagcaggtgcaaaaacagttactaagatgaaagaacagggtaaagaagcacttttcgtacaaacagatgtaaggctggaaacagatattattcgattaatggaagtagctaatcaaacatacggtcagatagatattttaattaataatgcaggaaaagagttattcaagtctccttacgatatttcgctagaagaatgggacgatgtaataagcacaaacctaagaagcgttttcttgggttcacgtgaagcagcaaagtatatgcgtcataacaaagaaggtggatctatcgtgaatattgcctctacaagggcgattatgtctgagccaaattcagaatcttatgctgccacaaaaggtgggatcgttgctattacacacgcgctcgcagcctcatttagcgaagctaggattaccgtgaatgctatttccccaggttggattgaaacaggagattattcaaaattaagtaaaattgatcatgaacagcacctatcaaagcgtgtaggaacaccagatgatattgcacgagcctgtctgtatttaacagccagcgaaaatgattttgttacaggtataaaccttgtcgtagacggtggaatgacgaggaaaatgatgtatgaggaataggcggtaatcaatcaagaaatacagattcgctatcaataaagcctactttatccaaggtgatttaccgaatcatcatgtgaatttgaaatacaattgaactgtttataaaaaagatgaaccggaatttcctatctctaataaagaagggatttccgtttttctttcggatgaaacatgtgaaaatgaataaaaaccatgaagtactcaatgcaaggacaccagctacactaagagcgttagttagataaaaaatagaatatatcattatagatagtaagagatattagtatcactgaacgggctgttaatagctattgaaaagcataatttaatcaatctcaattacatcacaaaacttaaatatcctttgattatgaaaagcatcggtacaagtaatcgcctcatttaatgaatttctattagaaactgttctgtattctttataaacctacgttaaaatattcagatgaaccttttattaactcataacccctcctcaaaaaatagtaaaaactacacttgtgaaatcaatattttctgtttgcactttatataaatcgatatgtctccaccttaatttttgttttttgtaatccccactaattcttttctcaaatcccccaaaatggatttgagaaattagggaactataatgtcgtattgaaacatattaagggggacaaaaggtgaacaaggaaatgaattatggaagtgattacaagtttattccagcaacttcaattgaaagtggtcacggcatcgaagtattacctgatttattttgctacacgattcaaatcgtcaacatatgttttgttgggaatccgcataccgatgattttgttttagttgacgctggaatgcctaaatgtgcaaatgaaattatctctgttactgaggagcgatttggtacaaatagccgtccaaaagcaattattttaactcatgggcattttgatcatgttggaggaataattgaactcattaaatattgggatgttccagtctatgcccatcaaatggagataccgtttttgactggacaacaaagctatcctgaaccagatccaacagttgaaggtggtatggtagcgaaaatgtctcccctgttccctaatgaaccgattgatttaggaaatagcgtaaaagcactacctatcgatggaactgttccccatatgccagagtttagatggattcatacaccagggcatactcctgggcatatttcattattccgagagaaagaccgaactttaattgctggggacgcttttgttacagtgaaacaggagtatctgtataaagtaataactcaagaacaggaaataagcggtcctcctcgttatttaacaacagactggaaagccgctaaagaatcagtcattaaattagaagaattaaagcctctagtcgctattactggacatgggataccaatgtcaggtgaattgctatcaacgaacctcaaaacactggttcaagaatttgataaaattgctgtacctgattacggaaaatatatagataaaaagatgcattaaatgcggaaatactttgtttattttcatattaatgaatcaaaatataatgcaaaatcaaaacaccaacgaatattaagtttaatatgaaaaaacactgtacttaggcaacatctctattataagaatggaactaccctttatgaataaagctcgatattccgcaaatactatccatagtataagcctgcttcttacccaggttgtacttcttaccattaaggggtgattaaaacgggttacgctatataaaagcataatccgtttttaatgaaatattgtattccatatacgtttaaacaatggaggaaaatgatgaaacatattgttgccttattaattaaatacacagcgataactgcagtattgctaatcatgctcagtatctttcaaggcatttcaattcctagagtattattaatttctctttttcttacgggagctgcctatttaatcggagacctcttcattttacctaaatacggaaatatgattgctacaatggcagatttcggcttaagctttttcggaacttggttactaacatccttgtttactaatttagatgctactcgtaacattggactttcttcatttatagccgctttaattattggtggaacagaagttttcttccatatttatatgaagaggctagtgctacgtaacgacgatgaattaaaaaatcgcaatcatattcaccatgataaatatgctatggagatgtcagaggaatatatggattcttccacagtaaataaatccaatcttgaggatacatctaaaaaataaaaaagtggccaacgccactttttatttttgtttattaagcttgatcggaatttcttacatgtaatggaggtggaactacccatccttttttcttacttaaacgtagcaacgttacacctgcctgcgcttttttcatatgaaattggccaaatagcatccctacatcttctcgaagacattttcccatcacctgactacatgtcacaagtccagctgctaatcctgcagaaacagcagcagcaatttcaacatcattaatacgtgctcccggaggaatgtcttcgatagatgcaactggtcgttctggaggagcaggcggtaaagcgaccccattaatctttaaaagagcttttaattcttctatttccgaattcatatcattttcaattaagccttctaaaaacttcttcaagtcttcatcacctgtgtgattcataaatacttgatgacttgcaattgcaccctgtgcagcaagaagatagctccaaatatcaaatacttcaccgtaatgtaacggttcattttgaggatttccacttaatatacccatttttaaattcctacctttcgaaaatatcataataaatattgatttcaatattgaaatcaaatttttaagtatgctttttcctgcaaaagattttctactatgcatggaaaacacctttccaacaccgcgtgtttattgtttaggaaagtagtttacaaattaaatactcaaagattatgaaagaagattatcaataatctttgagtgaaaatccatttactataaggttttttatttttatacatatacaaaagaaattgatttacatattcgctatattttacactaattcacttagcgattagctctaccaccaagttgttgttcagccattgctactaaacgttttgtaatttcaccaccaacagatccgtttgcacgagctgttgtatctgcaccaagttgtacaccaaactcttgtgcaatttcatatttcatttgatcaagagcttgttcagcacctcgaactaacaattcattacgacttccactattattgtttgccatcttatttcacctccgatgtttttaatatgctacaaattatgaaataataattatcctttttatggaaattagattatgaataaaaattgatttttttcttaaagtagggcaaaacatataagaaagaataactgatataacatactttcataacaacactatgtatacttcctaattcccttcagtaaataaaagaaagatttctatttcaccaagagattaaataaaattatgttttgagacataatccaaaaggagatatgagatgaaagctgtaacctatcaaggaccaaatcaagtacaagttaaacaagttgatgatgcaaagttagagaaaaaagatgatattattgtaagaattacttcaaccgctatttgcggttctgatttacatttatatcaaggtaacatgcccttacctcaaggatacattatcggccatgaaccaatgggaatcgttgaagaagtcgggccagatgtcactaaagtgaaaaaaggcgatcgtgttgtcatccccttcaacgtttcttgtggacattgtttctattgccaacatgaaatggaaagtcaatgtgataactcaaatcctcattacgattctggtggatactttggttatacggagaaatttggtaatcatccaggcggacaagcagaatatttaaaagttccatttggcaattttactccatttgttataccggaatcatgcgagcttgaagatgaatccctactatttttatcagatgttttacctacagcctattggagtgtaataaacgcaggcgtaaagccaggtgatactgttatcgtccttggttgtggacctgttggattaatgacacaaaaatttgcttggatgcaaggtgctaaacgtgtaattgcagtggattacttagattatcggatgaattatgcaaaaaagattaacaatgttgaggtatttgagtttacaaaattccccgatatgggagaacatttaaaggaaattacacatggtggtgccgatgtagttattgattgtgtggggatggatggaaaaaaatcgcctttagaatttctggaacaaaaattgaaattacaaggcggaactctcggccctattcaaatagctacgaaagccgtaagaaaatatggaacggttcaaatgaccggcgtttatggtggcaattataatgcatttccactcggggcattttgggttagaaatattaatcttaaaatgggacaagcacctgtcattcattttatgccggaactatttgaaaaaataataaataaagaatttgatccaaaagagattattacacacaaaatcccccttgaagaagcgagctacggttatcaaatttttaataatcgtgaagacgactgtataaaagtcattctgaaaccttgaagctacaattcattattcttaataaaaagataagattacatttcgtaatcttatcttttttattaaatgctaagtatctatcccccattttcatctcacatctaaaatagttatttccaaaaactttgcattttgaggtagtaatttaaaagaggtgtacttcatggttttattataaagaagaactgattaatattatcaaaccggacaaaccgctacaggtataaaaactattaacaaagcatcttaatgtttatgaaattctttgttaatagtttctcttctccctaatctcctgcgagactatatttttcattaaaattacaagtaaaaatttgaaatgttttcaagcataattacaatattaaaaacatcctttcttttggttgtaaagaaaggatgtttttataacaggctttttggaaggttttaatttaatcctaattatattttttataaattctaaaagtacattctttatttttggtataacatacagaaattattttttgaacagtagacagctgcagaagctaagttaaagtgtcgattaattccctccatgcttaataaaatccctgttatgatttctaaaatgactacacagttgagtaagagccgtagtagagattttttgatttaaccataagttcctatgatacttacattttcgtttcattccaccagtttctatagttaattgattaagtgtatcggggatataactcttcgacatatacagacaatcttgttttggaagtattacatgatttgtatgctattgtaacaagacttgtatcgtttctcgcttttccatgtcttattgcgtttgtcatttcctcttgtaaacaacgatagaaagttctattcagtttttgtttaatagcattacgttttatatggtttcttaaaaaatttcagtgaaaaaatatattaattttgaagtgtacaaatagggagagtgacttcaactgtagttcccttattcacttcactctcaataaatacatttccctgatgtgtttcaatgattttataacagatcattaaccctaagccaatcccctcttctttaatactataaaaaggttctccgaggtatggtatacgttcttttggaatgccacacccttgatcgataaaacgaatacttaattgattattatcaagtatatttaattgaatgagaatttctcctcccatcggcatagattcaattgcattttttaatatattaacaaatacttgctttaattgatttccttcacatgaaatcaatggaataccagggttaagatcgattttaatttttatattattcatcattgcttgaggttgtagtagcattaaaacttgatccattagcacactaatgttattaggttgcatttttaccacctgtggtttggctaccgccataaattcagttgtaatgctctctatacgctcaatctctgatgatactatattaatataaccctgattattctcactttccgttgattttagtaattgcatgaaccctttcattgcagttaatggattattaatctcatgagccattacagtcgctaattgtcctacaacagcaagtttttcagattttcgtaataattcttctgtttttagccgttcagtgatatcacgagaaatacttaggaaaacttttttcccatttaagttaaaaacacgaacactaaactcagttgttattacttttcctgttggaaaaagatattcatcttgcaaagtgaaggaagtttgtccctttttaattttttctaataaccttacgatcatttgagaatcttgtggtactatatttgaaaatgataatgagagcaactcttctctactatatccaaaccttctacacccaacagggtttacctcaataaatcgacttggagcattttcttcattcagctctactacatataccgcatcagttgcttgttcgattagtgcacggtacttcatttcactatctcttaattgctggtgtaatcgatgtcgttctctttctgcttgttttctttcagagatgtctctacatattgctgataaagctatcacatttcctcttacatctagtataggagaaactgtcagactaacatcaagaagactcccatcactcctttgtctaacggtttctaatctagtaaccacagattctcctgttagaattttctgaatatttttaagcgattcttccattaaaaaatctggtacacaaggtaatcttttacctatgatttcttgtgatgaccacccaaatatcttttcataagctttattcgcttgtaaaatatgcccttctcgatcagaaatggtaatagcatctagattgtgctttataaatgattccaataattctttagtagcgcttaattctgattctacctttttcctttcggttatatcaactgtagaaccaacaacttcaataacttgtccatttcgtttaatcggcctaagcgcaataagaataatagttttatcatttggccaaggtaattcaaatataatttcttttccttcccatgcctgaagatagtacttcatcaattgtggaactaaatgtggaggaacaatagaagcatcaatagtacgtaagctttttcctaccacctgttcagaataaaatccgttttgataataaaactgtccatcacataaagtgtgtataaagtgcttacccacttttttaaatttaaaaattcctccttgaagctcatgtacggtatctgcaagttcttgcttcgatttttttaattctcgattcattttagataagtcctgtgttaaataatacaatctctggtaggcttccataagaaatagcccaattaaaagtcctaacgctatatataataagcctcctgtgtaaagtaatgtagtattaaataatacgccaactaaccactttattccaataaaaacagaaaaatataacgatgcacttttaaaaggatgtagttttttaaaataagttttaaaggtagaaaatagaatccccatacctaaataagcaatcacaggaggttcccagtaccctcctgtgtaaaagatacgcattacaattatgctaattaacgtaatccaaccagcaatacgaccaaagtaaataaaagatagaataagaggaacaactcgaagatcgtaggaaaatcccatgtatggaaaagaaaagaacattaacgtaactgcaataatccctccatagagcttttcaaaatatcgactagaattaattgtaaacacttgaataaatattgctgcgctaactaataaagaaaaaatagaaaggttgatgaaataatctttaataatcatgtaatgtccctccttgcattaagtgtattcgacaaaaaagctaaaaatcctacaaattgtataaacagttcaaatgcataaattttaaactaggataaaatctagaaaagtaaataaggggcacagcagatgagatattttaatgaaaaatagttcaaaaaagataatagtaaccgttgactactattatcttttttctttaatttatcgtaatatgtctgaaactctaagggacgtggtatgtcatttcatcaaacaatgattatatgctgagtgatgaatatagaaatttcagcagtaatttttgaaaaataacataaaaaacaaaactatctttaaaaatggaaaaaaactatataaatgtcaactaatctatgtacaaaaacgttcacttaattttgcataaaattactcaacttaggaagctaagtagttcttcaaggtcgataagaacacctgtagatgcttcaggataactacataattgtatgagtaatgtacttgaaacctttcggtaaaaccatacacataagacaactaactccttggttcaatatttactttttcgctgaacaaattctttttcttgagcaaaatattctaggatataaggagatttttcaattaacttgttgtctagtttattgtccagctccaattacttcgttactttcagattcagttcattatattttgtactttgtctttatacacaacatattctttaccatccactactgctactaccgcaaattcatcatttggattgaatgaaagccaatcagcccacatgttagtattagcccctccactccacatattatgaacagtgtttttagttaaattcataactttataagacgcatttggcgcatttgttccagtctttatttcaaaagtgtatgcgttatgaatttttttataaaagtagaacacgtttgatggacgaagctgattcaaaaaatcctgttcttttttctctgcaatttttatcccttcttgcaaagtgacaacatctgtttttaatgttttccaactgtttttcgctgcattcaagctaggggttaagaatttatatttattttgatcagctttttgatcagctttatcaatatgtcccagtacacccgaatattgagaatctaaatcctcccattgcgtagacatataagtaagagcagtgatagcactatcaagcatactatgcatatcactaatattatgaaatgcaactccaactacacgattcaatgttattttataatctacagtctgacgcaatttttctaattcaggttctagccaacctaacttacctcttgcatcacctatcattatgccaccagcaatcaaggttggaataaaggggattttcaccatgtctaagcccttagattctatgtctttctgatattttacttgtcctaaaaggtcctctagacgcttttggtcagcctccacatcagcaccttggttttttaaaatcgattgcaatgtctctttatgacttccaaatgttctaacatcttctccaatagcattttttaattgaattaattcttctattaatgcttttgcagacttttgattttgttgaattcctccctgtaaatctgtaatccctttttttaaagtatctccatttccagtattgatcgcctctactaatgtttcataataattttcaaattttgtatcgtattctataatgcctgtcaatgtatcaaaaagctgtttttttacttgtgtattccatgtaacagcatgtgctcttgcattcttttgatcttgtacaattttactaggtaaatctgcatttccattaatagttattccttcaaaactcacatctggattattaattagcaaataagaatattcattcatagcttttgcaaataaaccagcatcttgcaaagcttttttcatctgttcttcatttgctgaaagagacatattttcattgttcgtttgttcaatttcaattgcaaaagtttctagtggtatgactgcataagtagttgttatagttaaaaacgctgatacagcgagtagtttatgagggatttttttcatcattttgtattcctcctatataaggtatggtttcaagttctaatcttattaaaaagcgatgtctttcaaaatgagttctacatcttttatcagtatcgtttgaactttctttagcagccttcaaatcattaagtattaaagaaaatgtatatcatctgcttcaaattaaccgattctattgcaaattttaaaaaagcaattaaactacaaggttattctttattcgaatcatacttatatataattgaaaggcgaagtctttaatgagactccgcctttctgttatataaggatttattaattattacttttctgtttaacagtgtaatcatagactttctatgttttagttcactttacaacagaattaatatttccctatttttgtggagtaacagtttccacttttaattcctttattccttcttttaatgtaacagcatctgttcgtaatgttttccaactgtctttcgctgcatttaaattaggttttaagaatttaaatttattttgatcggctttttgagctgcattctcaatatgccctagaacgcccgaatattgagaatctaaatcatgccactgcgtggacatataagtaagagcgttaatagcatcatcaagcgccttgtgcatttcattaatattactgtaagcaactccaactacacgatttaaggttactttataatccacggtctgacgtaattctgctaataaaggctctaacttacctaaattatcccttgctactcccactatgataccgccaattattggtagacccaaaatagcacccttcattacattaaacccatcagattctaattgtttataatagtttactgatcctaatacttcttctagacgcttttgatcggcatcaacatctgcaccttgattttttaaaattgactgcaagagctctttattacttccaaatgctctaacatcgtgtccaatagagtctcttaatttagttaattcttctattagttgttgtgcatacttttgattttgttgaatttcacctcgtaaatctgtaatcccttcttttaaagtttctccatcccctgtattaatcgcctctatcattgtttcataataattatcaaatgttgtatcgtattcaacaataccattcaatgtatctaaaagctgtttttttactttcgtatcccaagtaacggcatgtgcccttgcattcttttgatcttgtacgattctaccaggtaaatctacatatccattaatggtaattccctcaaaattcacatcaggattcttaattaacatataagaataggcattcatagattttgcaaataatccagccttttgcaaggtctctttcattctcgcttcatttgcagaaagagccgtatctccattattcgtttgttcaatttcacttgcaaaagttgttactggtgaaactacattagcagttgtaatagttaatagtgtcgatacagcgagtaatttgtaagggattttttttatcatttcattttcctccaatttaggttttaaatttcagttctactcctgtttaaaagcaatatcttttgaaatgaattctgcatctttatgaatatcattccaactttctttagccgcttttaaatcatctggtattaaagagaatttgtggtcttgcatagaatcgatattatccaataaatctgtataatttgcgcccattgtattccattgcttttgaatatttgttagagacaatatcgcttgatctacagtctggtataaatatgccaatgtttctttcgcgttagtaagcgaaagaactgcttgattagcacgatctgctttcatacttaattctccgattttgttagaaatttcattataggaatccatatgcttagatgctgtgacaccagccgcagttcctagaccgataccagctgcgccaagagccgagagtccaccaacaacagccggtgttgctgtaccgccagttacaacaataactaccgctcctccaatagctgcaataactaaaatagctgctcccaatccaccaccaattgaccatgctaatacatcatcaaaatgttttttctgagtagaacgaagttgctcaatttcagcttgaagttgtggaatcgttgcctgttgacctgctaatattgcagttaatccacctttcccatctggaccaccaacattatttttaaaatctgtagaattttgatataatttccctttgaagtcttgtagcatcttaatcacatctgtaacttcttttgaatttgtattgattgtagtaattaaatcatttataccctcttttagacctgccttatctttcttttgtacagtttctactaatgtgtcgtaataattttgaaattgttcatcgtaatttacaatattacgagcagttttttgaatctgtggcttcgctgtatctaaccagtaattcgcattgattcgtgacagctcttgattaaggtgaatatttttgagcaactctcccccctctgagcctaaatcgatattagataaatttacatttggttgcttaatcattgtttttgcgtataaatccattactagaatatgagaccctgtttcagctaatgctttcttcagtccttcggggcctaatgcataattgcctactttttgttcttgagcggtcgtttcttgtgcaaatgcatgaatagtgttaccggtagtagcagttataacagttgctaatgtagctaaagttagtactttgaatggaaattttttcatgactattctccttctttcgctaaatgcttataatctttatggattcccaaaaaacgcaatattaaaatttatatacttgttcttcaaggtaacttattacattttttaattgtcttaatgtatctttttgagactgctcgttagttgtatcaacattagtagataattttgtaatgctattttttattagatttaaatcttctttatagcgctttagtagatcaagttctacatctacttgatttgcaaacgtatgcaaatcattttgtgtaagaagaagcattgatttttgtaaatcagctattgataatttcgttgttaaatcatatattttttgattttgtttctctaaatcatctaaatatgctcgctgttctgctgttaatttatttacttcagcaaaaacgccaaatgttttcttaatcttttcggtatcaatggctttcatcaggtcatactcttgtgtttttgctgcggctgcggctgctatttcaccttgtttgcttttctcaattgcttcacgagctgctttttttgctgattcaatctctagagcagttttaccttgttctgtcgcttcttgcgccgcttttttctccgcttctagaatagagttgttaatttcttttcctttgttatacgctgccacccctgcttgagcagccggttcaataatttcttttgaaagactataaacttctttgaatatagcaaatccctgctcatttaaagctcctggtattaatgcaatttgctgtaaatcattttgaattgcttttttggtatttaatatttcattttttaactgatctatttttcctgttccatctgtacttagtatgccttgcgcagttgccacattagtatcaaaatcttttaattttttatcaagctgtaatttaagatctgttaattcattgatttgtcgttgcgcattttcttgattcgtcatagccatttcttgaagtacttcaagtctatccgaaaacccttctctatcttctttattgtctacaaacgattttaatgtcgggtaataactattaaattttgttacaaatcctttactttttgaatttaatagaattaactgtggatagagttccgatgaccattccttcatatcttgtttgattaggaattgattggtatttaaagctgggacttcctctagctgtacattaggactcattaaagattgatcaatatacgtttggactaatttagaatgcgcacctaattttcgtaatgatgaagaaatatccatgttttcttgttgagtttctgcttgaacgattggtgttgcgagagtattgataggaatagttgctccagttacaatggatgttattaaaaatcctgtcattattttagttttcattccgtacactcctttaccattgtttttataacttaattcatataacttgtacgaccgctctctttgtaaactggataagaaggagaaatctttcagatacgttaatatcgttgttttttacttctaataggatataaggattttatttatctctcatttcgatactctattttttaaaatataaataacaaaaatttattaactatatttgaatcaggcaccttatgagtagtaaattattaattctttcctaaagttgcggtttaacttacagaatcgtgaggatcaataaaccaatgcttacagttaatcctgtcataacattgtttaatttcaatttgataatatccctcttagttttgtcagcaaactccttactagacaacaaaagatgaaattatactgtacattgcttatacttttattgcggaataacttcacttttgttatgcagaaacttagaacacgtttattaccaatttgattcttgacctcttataaataaattgactatttagaaaattattaaagacataatgttacttataacttcactataattcctattagcgtaaccttctcctttctgtctggtcataccagttatgttgttcattaaaacattaaatttttaatgcgtaaatagaaaaattttgtcgattaagctcgataattcactgttaaataaaaatatgtcccgaaaaaaattatataaatatagttattcgtaaatttcatttctgtaattggaatgattacaaattaatgtgtatacggttaaaaataactattttagctcaaccaagaaattttattttagaaaaaatacttatagaataatataataggtctttttatacttttttacctttatttagttatgcataattgcataacatgtagatatatttagtaatatatgttatattattgatttttttacataacattctaatatcattattaacaaatatctagtatgaagatattagtctataaacttgtcatcgttataaacataggttttaaattacaaaaaagctgcaaagcttccatggaacactttgcagccttctgtctttttatttcctttagcaaaataacggttaatgtattttttcaaattaacaatatggtacaaagatttccattgagcttttgctcacatatgtgtttataaagtcttcaagagctatttgtttgagctgacgtcagactagtttatctgatttagaactataccgataaagtgcaactttaatcagtgggggttttgttcatccccactgattattagcccacaccaatcgggcttttacgggcagcccaccccccccacctaacttctttgctttcgctgaatttttagatggaggtcttactgcccggcaaatagcgggataaattcagcacatgattgttattaaaaaaatagatatactttgtttctccattatttttctaactcctaaaaattgaaactgttccgctaacaagataatatctggttaatctcatacgtctatttgaatacaagttctttttctagacaaatcacaaactctttctagcgtaataagttcagtattttcatcttttgggatacttacacccatgtttaagtctttacattggagacagtagataacaaacttatattattgtatatttttcacggtactgcctaggagtcatgctagtgatttttttgaaaactcttataaaataactttggtcattaaagttaagccaagcacagatatctgataacgaataagtagtgagtgttaataatttctttgcttcttccactcgttccctttgaatatattcacttaaagtaattcccatttcttttttaaatagtttagacagataagtaggcgtaatttctaaatgattagcaagttcattcagagatattccatcgtaaacatttttattaatatgttttatacatgtagtaaccgcgtaagaatacttttttgcattgtattctttcacacgatctgcaaaggtacgtaaagcgtcccctgataatcgctttacagattctacattatctaattgttctagggtttgtatatataaaatactatgggcaaaagcaatatctggtggcagatttccttctattgcatatcgagtggctaaggtaatcgcaataattccaaggtttttttgattcctgagcggatcctctactagcataagttcaacatcttcttgcgaaaccgcatacatatactgtattaacttttttttatttccttctttgatagtcgaaaagaaatcatttactaatgccatattgtgcgttttaggtttgttttgtcgacgttttaaaatatataaatcaggtttcacatttttattaggagtttcctctagtactttatttttttccaagacaatatctacatctaacttttcattgaaaatcatgtaatgtaataaaattcccatatcaattaatgtagtttttttaatctccgataaacactgataataggcaagtctttcttgaatgttatcatttgatttaaattctttctgaaattttatgatcatatcatctgaatcttttgaatgtatagtaggaccgattataatagtccctttaatatcatcatgattttctatatgaattagaacaaaattttcaagatagttgttgcttcgaaaaagtggcaagttacagggatcgttttcttgataaatatcactaagatgttcttcttttgaagaataaaaaggactacaaacattatcagatgtagaatgatataaaatttttctgtctgcagataaaatatgtacaggggcattaaatgctttatgtgcaagatcacacaagtgttgtatatcgatagaagtattcattacattctcctttatagatccataaaatatattttgttatatataattcacgacaaataatactataaaatatcaaattagtacaattcacaacaaaatattactatatcttttttataaaaatcatatattatttaattgtagttagcatctaaatatcagagtagatacgtaaaggaaatacactaagttcttttcttaattctacaaaatataattattgaacttgagaaaacagtgaagtacttcaaaatacagtggtagtcaatgcgaggaccaagctggaaaaagatttaaaataaagcgaaagtaacaggagatactgtaccaccgcaagaaacaacagtcaaagttccaattcaatcatttatacaaattgaattcaaaaaataaatactgctaatttaaatgtgaaactgaaaaactattttgctccaaattttagaaaaagataataaagaagttgtgaaattggaaacagatgaaagcgatacggctatttttgaagcactatgctttgaaaagtacaaggtggaggaaattcaagtactcaattaaatatttaattgagagaaaggtcttttcatcaactaaaaataaaaaacgaatggaatattcaaaaacatgacactatattactggtcgtaacaatagttttactttccacaaaagaggaaaaatatatagactttacaaatactaagaatagcaaactagatagttttattaccgcatcacataaagtgaaactttaatcagtgggggttttgttcatcccccactgattattagctctcaccaatcgggcttttacgggcagcccgcccccccacctaacttctttggcttcggctgaattttgaggtggaggtcttactgcccggcaaatagcgggataaacttattattaatttccaaatacaatagttgttaatcaacaaaaaaacttcaataattaaggtgcacagtaaattgacctcaaaacagtaattactacaatatcagtttttacttattctataaaaaagaaatatcacttaatgattattattttatatcgatttagacatagaacattttattatatcggcttaagtaattatggaattaaaattgcgaataacaccaaaacccttttaagggctcatatatcttccatatctaatttaacacctttcgatacctattccattaacatgactaaaaaagtttattacaaaggaatctgaggagttttttcgatttcaaattttatttttttgtaaattaaaggaaaaataatccgtatatatacggattattttcttagtgtaatctgtattgacctgttaactgtttttcaaccattcgaactaagcgttttgtaatctctccaccgatccgaaccatttgtagatgatgatgtatcaagtcacagtgttactcctagttcaaaagcaatttcatacttcatttgctcaatagtacttgtagtagtagaaataagaatttcatttgtattactttcgtatctttaaatattgataattgcacttccaatatatttataaataacatgtgcctacttatgctatttatgcataagtaacctaatttcttctagtatttttatgggaaccctttccctcccctttttctttagcttcatcaatttctaacaacatagattttttatttgtctgcttaatgtattgagtatacaactctgggaattctttttgtacttctttgtttaatactggtttatatttaatcatgtaagtaacttgtaacaatgagcgttttaacaaactatcttcaatgagatacgctactttattaaataaatgtacatataattgaaaatctctttttccttacaaattccttacattcgaaattgtttctatattgataggattgaagtagcgtctgtgcccgaaaacgcaaacaaatagattacctgcacacgaaaaagtatagtgcacaggtaatctatttgtttttaagattaacaaaaacctaatttattttttgaattcttccatcaataacagactgaattggttcttttgatttttttatataatctactaatgcttcaaaatcagttggtcctgtttcagcatctttaccgtttttaaaagatacaaatccatctccacctgaagctaaaaatgcgttagcaacgacgctgtaagttttagaaggaatgatttcttctccatttgttaagcgaatacttgttactttttctccattgggcttgttcgcatcccaagtgtattggatccctgaaatttgaagcattcttgttatgtctttttgccattgttgatttaaaatatcacgaatgtcttgacctgttaaatttacttttattaattgatttccgaatggttgaataccatatatctctccccatgtaatatcaccagcatctaagtcattacgaataccaccaggattcataagtgcaatttgggattgcattgttgtacgctgggcatcagcaactaaatttccaagagtagattcaccagccgtattgagtttgcgatctagtggcgcaatagacttacctacaacttcattaacaagaggtgcgatttttgcttgatatttctccatcttcttctttatttttttatcaggctctatgccttcatgataagttgtaacaatttctgcttttttctcaacaatatcttgtgttttacgatcaatctttacatcaacatcagcaaaagccataccatatgaatttgcttgtacgacaagtttattattaacagttccatttacataagtgtggctatggccaccaaaaataacatcgacttctggatcagtctcatttgctaatcggacgatatcaccatttgttacgccgttcccatctgttatacctccgttatgtgcaagaacaacgatagatttaacgcctagtttttttaattgctttacggatttgttaatagcttcaacttcatctgtaatttctacattctttagcatagtaggcataacaaggttaggaacatccgttgttacgactccgataaatccaacaggaactccttgtaccttttttatagtgaatggtggtaaaaataaacgaccggtggatttattatagaaatttgcagcaacatatgggaattttgctcctttaaaattccctgttttctcatggtatccaccataaataaggcggttcatttcttcaacaccttcatcaaattcatgattccctatcgttccaacatcgaatttcaaatcatttagaaattcaatcgtaggttcgtcttgtaataatgctgaaacaggagtacttgctccaacaacatctccagcatgtacctttaatgtattcggattttgtttttcacgatcacgtaaataagcccctaagtactcaattccccctgcatctttattgttaattttttttacagtgtctagttgcccatgaaaatcgttaataccgagcatttgtacatctatgtagcggtttgattctgtacttgcttgggctgaaggcatagcaaatacactagtaaaagtaactgtacttaatgctaaagcaactggaatgatttttttcaacataaaatttctctcccctaattaaaatctgacataatacgatgttattttaatatattaagagaattatttccacaaaaattctaccaattataaaaattaataagatttcattgttttctgacaagatatttcttcctcaaaaaatgtatatttctttgttttgagaattattcaaaatattatcttgatagtaatataacaatacttctaagaaatctaaaaaactctaatcaatatattttagctgttaagaagagtattcaatccaaaattaatggagatttatcaacctaacatctcaatatcaccatttaaaaagatgctcctggatttatccaagagcatcttttataaagctttattttttacttgtttataatttatcaattaacaattatatagttgtaatcagtcatttaaaaataataggagtgcttcattaaattctttggcatgcgttgcatttagcccatgtggaccaccctttattaacgttactttagaattaggaattgcttcatgtgttaatttcccactatattcaaatggtacagttgcatcagaatcaccgtgaataataagagtaggtatattaaacttctccaagtcttttctaaaatctgtcttactaaaggcggtaatacaatcaagtgttcctttaggtgatgcactggctgcaatatcccaattatataaacggaatggctcactaactaaatctgttcgattaccagctgcgaaaaatcccttagtaaattcatcaagaaatgcaaggcggtcattaatcacaccacttttgaacgcttcaattgttgcatcatctaatgccccttcaggatgatcctctgatttgtataaatatggaggaactgctccagcaaaaacagccttttcaatacgatctgttccatacgtactaatataccgggctacttcgcctccacccatagaaaaaccaacaagtgtgacattttgaagctctaaatgttctaataattgatgtaaatcagaagtaaaggtatcatattcatacccttcccacggctgagatgattttccaaaacctcgacgatcatatgttataactctgtatccagcctcaacaagagcgggaacttgatattcccaagattgaccacttaacggccaaccatgaatgagtacaactggttttcctatgccatgatcctcataatatatctcaattggtgcttgattttcggttcctacagtaatttttgccattttcctacctcctttaatatatatccttttcttcaataatccggatgaatctcataacctatttatgcacatttatattgtgaacgctaagtatgaaactctattgttccgatgaattcattttctgtttatggaacgcttccccatctcatacttttttcatcacgaagtatttgctgaacatttctcctattcaattgtaataacaaaagtaggtgactatcaatatcgttctatctatagaatgtataggtaaaaccaattcattttatagtgaaaataactatagttaccacctatacaaactatagataatttagaattgattaacgaatcagttttcaaatactataaatttgtatagcgcttcatgttccgtgaatgctgctataaccaatattattggtcagcttagttataaacgaagaaacttatgatagtattcgactatttaaactttctttgattacttaatttttaggaggaatacataatgactgatctctattctcgtattaacaaagatgatgctctcgtgcttttagtagatcatcaaactggtcttatgtccggactagtacgtgactatggtgttgatgaattcaagaacaatgttttagcccttgctcatactgctaagttttttgatttaccagttattttaacaacaagtttcgaaaacgggcctaatggacctttaatgcaagaattggttgatctctttcctcatgcaccaaaaatagctcgacctggacaaattaacgcatgggataatgatgattttgtaaaagcaatcgaagaaactggaaaaaaacaacttatcatcgcgggcgtagttacggacgtttgtgttgctttcccagcactttccgctataaaagctggatatgaagtatttgctgttactgatgcttcaggaactttcagtaaacaagttgcagatgctgccaatacgcgtatggcacataatggcgtacaacttatgaactggtttagcgtagcttgcgaattacaacgcgattggcgcaacgatgtcgaaggttttggcaatttgcttgctagcaatcttccaggctatcaaaatataattggaagctataggggagctcaacgagatcttagtaagcaaaatgtataagtgtattccaaggaaatagctttaaatcactttttaaagtagatagtataaatttagtgctgattaaatcagcactaaattttacattaaaaagtatagcagtgttttaattgacagaaaatatattattttcgataaacaattaaaaaaggagcgttttattatgagtaagttagaattgttaaatccggagaacagtgcattaattttgattgattttcaaccccaaatgacttttggagttgcaagtattgatagacaaacattgattaataacgttatgttgcttgctaaatcagcaaaaacttttaacgtacctactattcttactacagttgagacacgcagcttttctggttatttttggccacaaattcttgacatattcccaaaccatgaaattatagaacgcagttcaatgaactcttgggaagatccaaaatttgttgaagcagttaaagcaacaggtagaaagaaattaatatttgcagcactttggactgaagtttgccttgcattccctgtgcttgaagcaatgaaagctggctatgaagtgtatgcagttgatgatgcttcaggtggtactagtctgacagcacataacgctgctatgcgtcgtgtagaacaagctggtgcaattccagtgacagcaattcaagttttacttgaataccaacgtgactgggcacacaaagacacttatgatgctgtaatggaaattgtaaaggagcacactggcgcttatggtcaaggagtagaatacgcatatactatggtgcacggcgcgcttccaagcaggaaaatatgaaacaagaaggagtagctgtcgaagagacttatacagggaacacgatggatgctgctgatccagtaacaacgattgttacatgggaaattcaacaaggtaaagaaaaacagtttgaaacatggagacatgaaatcgaagctgccgctactaaattcccagggcatttaggtgtaaatctaatagtcccaaataacgaatcgagagagtatactgttatttttcgctttgatacgtatgagcatctacgtgcttggcaagaatcagacattcgccgggatttgttaaaaacggcagaacaatttcaagttactaatccgagttacaaaactgaaagtagtttggcttattggtttgttactccgaaaacgccagttccaccgccaaaatggaaaatgtctatcgttacccttttgggtgtatggcctcttagcatgttagttcctaaagtgataggacctattataaaacatatgaatcctattatgtcggccttttttgtttcagtatgtatagtgtccttgctatcatgggtagtcatgccgattttcggtaaattatttcatccatggttacaaaataatagaaagtagacgaggtgtgaacatgaatttaccggatatgatcttatataacggaaaaattactacccttgacccttctcagcctgaggtatctgctatcgccataactgatggtttagtcactgcagtaggtggagatgagcttcttaatagtgccacggaaaaaacaaaaaaaatagaccttaaaagaaagagagctattccaggcctgaatgactctcatatacacgttattcgtggtggtctgcattataatatggaattacgttgggaaggcgtgccatcactttttattgctctagaaatgctcaaagaacaggcaaggcgtacacctgctcctcagtgggtaagggtagttggaggttggtctgaatttcaatttaaagagagacggttgccaactttggaagaaattaatgccgtttctgaagacactcctgtctttgtgctacatctttacgatagagcacttgtaaatcgtgctgggctgcatgcactgggatatacaaaagatacaccagaccctccaggctgcttaattgagcgggacaaacgaggtaatccaacgggccttttaattgcgaatcctaacgcttctattctttattcaagtttgggtaaagcaccagcacttaattttgacgaccagattaattcaactcgccattttatgcgcgaattaaatagattaggtattacaagtgctattgacgcaggtggtggattccaaaattatcctgatgattacaaagttgttgaacatttagccgagaaggaacaattaactttgcgtattgcttataatctatttacgcaaaatccaaatcatgaatatgaagactttgcttcatgggcaaaaattgtttctccaggtcaaggaactgataagtataaaatgaatggtgccggagagatgttagtattctcagcagccgattttgaaaaatttcaaatgccacggcctgaactagctacgatgatggaagctgacttaaagaaagtaatttctctattggtggaaaaccgttggcccttccgtttacatgcaacttatgatgagtcaatcacacgtttcttaaatgtattcgaggaagttaacagtgaaattccttttaatggtctacgatggtggtttgatcatgcagaaacaatctcagatcgtagcatggaacgtgttaaggctttaaatggaggtattgccatccaagaccgcatggcttttcaaggtgaatactttgttgatttatacggaaaggaagctgcaaagcgtactcctccgatttatcgtatgttagaccttggtatacctgttggcgccggtagtgatgcaactagagtttccagctataacccttgggtcgctctttattggatggttgccggaaaaaccattggtggactttcgatatacgatgaaaaaaataaactggatagaaaagtagccctggaattatattcaaaaggaagtgcgtggttctctggtgatgaaggtaaaaaaggaacccttgcagtaggtcagtttgctgatcttgctgtattgtctgctgactactttactgtgccagaagaagaaatcaagaaccttgaatcattactcacaattatgggcggacaggttgtgtatggaaatgatgaatttaaaaatttatcacctgaattgccgccagcatcacctgactggtcaccgacgggcgtttatggttatggcggtgctaacctagccaacactatactttctcacgatgcccatgataacaagttacatagttgcagtaaccctctccatcaacacactcataccgtaataggaaaagatggaactaaatggggtattggttgtacttgctttgctttctaaatcaaaaccaccggtataatgccggtggttttctttatgcaataaggatatgtaaaaagaaatagcagtatctccctaatggaatctattactatgtgataaaaccgaagagttaattaattaacttgacttatttttaacagccttctccccttgcaaagtctgcccttttttccttaagtaaaagtcaatgatattcccatttgaatcgatcacaccacacatataaagtcaatgccctttgactgtaatttagctcttaccccaaggattatgtatcatttttaattctcacactataatcattattatttctattatactaatactttttcaggatcatgtaacttctgcataaagatacgtgctgcaaaacttaaaaatttatcatcaaagtgaataagattaatatcttgccttggtgttggatcaataatacgaactatgctcaaagtatcattattaacaaagtcaactagtgaaagaggtattatagcaaccccatgtccattgcatacaaggctcaatagagaaatggaagattttgtttctatatttacttcagataaagatagccctaaactctcacaatatattttaatagtttcacgacaactacatgaaaccattattctactgagccctactaattctctaaaagaaacaaatgatgtttcattcaaaggatggtttttgggaatgacaaggacaagctcttcgctatacaaaagggtacttgttaatgtgtctggaatttgagcactacgcgtgatgcctatatcaatatttttatcaacgatttgatttacagcaacttcggattctataatttttacaacgatgttgggataatgttgttgaaacttcataatataaggtgttaaataagtgagatcctctaataaacctcctatagtaattacacctctttttacaccctttaattcaaaaatttcattataaacgtcatcaaattgttgcatgataaattttcctttatcaaatagcagcttacccgcttctgtcattttgatacctcttccaactcgatgaaacaaaggtgtatcaagttcaccttctaacacacggatttgttgacttaaagtcggctgtgaaatacctagaacttccgcagctttagtaaaactattattattacaaacttgaataaagtactctaaatgacgtaattccattcttgatacccactcccactctccgctttatgaaagatttataatgaaaaggacaatatgtatacgttatgcataacaactatctttcctactatatcaattgcaattacataatttctttattttgtactacaatacatttactactatttattaattttccctcctatttatttaatttatatttaattaggatattactaaacagaaataacatctaaaaacttacactttctgtgcgtaatatcctaactttttcaactgtttacttatcattttttctcaatatagtccaaactaccaaatatttgccgaatcccctctttatgctgaggaaaaattagtgtcaccaattcaatactttctgaaataattgatgcatacgtgacacggcggtctttaggacatggtttcacctcttcttttccaacctatccactacatacgtgatacaaaaacttgcaagtaatattttgtccccaatttttttataggctgatcagctttactgtatagtagctcaagcactgcaaattcagttgcattaagtccataaatttttagatccttttcaatacgtttagtgattggctgtaattcccttgataatataacaattaactttaaagataagctctcatcgttaatcacgctcacaattaccaatcctttacaaattaccttgaattcgagatttattatattatcgtcaaaatattatgtcaatcattcattttagctttatcaagccacttataatttatttctcaacataagacatatggaatcgttagaaaataactgttaatatatagatatctcaattacgttattttttagagggcttgttgtctagcgcaagctctcttttttcatagtctaaatggaattcggacacattttatatggtgagttttgccctcttttagcgatagagacaaaaaatctggttgtgatgtaaaaacttcaaaataaccgcaaataatctataaaactcagacatatcaatgaatacgcattcaagcgattccgatccacaatgctacactccatccacctcaagcgtatgcccatcctccgacaaagggtccaacagcaccacccaaaaagaaaatagacatgaataatccatttaagcgactacgcacttctggttgcaaagagaaaatcaaacgttgacttaaaactggcggaagaatatcgtactcgatgtttccgccccgtcgactgcaagcaaagcaacttctagagaggggaattcaaagaggagaattgaaagaaaaccttgatattgaattatccatcgatctcatttacggaccaattttttatcggttgctagtaaccggtgataagttggatgattcctatgtacatcacttggtaacaagcgcattcgatggaatacgattaacatgaataacattcgaaaaaagaattaaatgcgccttcctcatatacgaataaaatttcgcttaacttaataaataaaatatctaattatttaagcagatgtatatgaatcggtcccccacatacatctgcttaagagttgagaattaccctaaatgaatgaacatgcaaaaaaatttattctgaggattttacgatattttatttaatcgaaatgtgacataactcctaatattagttttattaagacgcaagctccctctcttctattttttaattgaatattttaggtttataatgatttatttttagagataattacctaatttattaacttattttagagtaaaaattaggagaagcctatcgtgacagactcctcctaaaaaacaaccgttatatacatatggaaaataaatttattttattaataatgaatattcaccagtgttatcatcaaatttatacacattcaaataatatttccctggtttcgctacgaattttccctttatagcatttccttcatcttcaccacaaactacgtaattttgcatgtctgattcatgataaagtacccatgtcatcccaatgttttgttcatttaccacagaaatatctacttcttttggaactgtaacatcaaacgtataaacatctgtttgatcaggagcaatcagatttccttttacaagcttattaaatgggagtaccttttcctcttcaagggattcacctgtttgcggatcttgttttacagtaacttttgtttgttctttactttcttttcctctactatctttcacagttagttccacagtatatgttcctttttccccatatacatgggtagggttggcttcagtacttgttgtaccatctccaaagttccatagataagaaataatttttccattttcactttctgtaccatcactatggaattgaattccttcatttactatcccgctatatggtccattcatatttactatagtcgttgttttttctttttcctctgttgcaacaccatggaaaacaatatcatattcaaattgattggctgcattcacacgatagttaacaaaataggctgtaactgttttatagccgctccatcctgtttgagacaactgctccaaggtttgattgacttgtttactcattgttttccagtcttcagactcaccttttgatgtactacctatgtacttgccttctacagtaaatgtgttaaaaaattgagactcatgttttgtgatttttgcatcttttatattagttacatcgacaatttctttcttcacttcagctaacggcttaggtgcatgttgtattaagtaatcatttgttacttgtggtacattgtatttatcttgattatcaatcaactgctgcatatacgtttgatattctgtattcagctgtgcatctttacttaatgcttcacgatacgcgtcataatttttcacatcgtttgcacggattaaatcctgaatcttatcaaaggtttcaaagtggtgattatatagataagactgtagtgcaaaggaataattataaaaatcccatgatccatattttgcgaacaaagtttgctttgcagtataacggcttgccggatcagatgataagccacttataatacttttacgtggaacaacattatttgtacgtgtagatcctgcaaagaattctgcattcccttcttggaaccaagttaagcgttcattttgatatagttctccactcccaaataaaccaggaacctcgtatcttccttgtaaataatgagtgaattcgtgacggaataactcttctagactataaatactctgttttggtgtacgctcatatgtaaagaaagtacccttctcttcaatataaataccgccgttgttcgtttcatatccatataattgtctatttaattgataatcatctggattattataaattacaattgtcagcacatcatctgcgttacctggttctagtgctttatcatttccaattacacggtgatattgtgcctttacttctttggctgcccaatataaccttttaattttctcttctgttactttatcgcctgtcttaaaaacaatagatccatcatcaaatgtatatgttttaggtaagtattgtaacttcccttcttcacgtattttctgtaaatctactgtatttccatcataatcttttccaccgtagtttgttttgatttgctctaccgctataaaataaggtccacttaggcgaggatacatattcatcgcttgtgtaataacttccaatcctttgtttggattgctatgaaatttccctaaacgtcctgcataataaatcccattattaattagccaactattctcagttgttaaattccgtatgagagcaattctactaatctcatttataaaattatcaatttttccataccacattgttgcattaggttttttattcgtttcctgcaaataagactgtagatcataatcaataccttttacaatttcatatacagcttgttctttcgtataatttttagcatacatagaaaggttatcattaaactgttttaaaatatttgctgcatactgtactgtttcagcatcactagaagcattactaattaactttccatacgcaactactactctatcttgctcagctgtacctaatgtaaagtttggattttttgcaattgcttttaatgatggtaaacatttgtcatggaagcttctctcttttaagtaacctacttcattattaaaatatcccacataaaaagcagaacgtaatacttcaacaaaagtttcaattccctttgaatcctctttcgtaaaagatgtccctctttgtcctaattcatcaatgataacgttcatacgttctttattttgataaaaagctttcgtatcttgattgaattgaaataagtctgtaatttgattccatgaaactcttgatagcgtatcaatgaattgactatcaggcattttattcaattctgccagagtatagctttgctttaattgcctttcatcatgtttcatcaccgaagtaggtcgttgtgaaaaatcgcctacttttaaacgctcttcaaaagttaaagttccatccgcttttgtagcatgtgcaatttcatcttttaaagtttctgtcccaatcggtttcatctgtaacgtattatagggtgctttttcttctgcggatacctgtgtttgaatacttccaaatgataatgccatcgtactaataccgatcatcatttgagtaaattttaaattcttgttcataacatttcctccatttatatattccacccaaaaatataacattttattttaataaatcatcataaaatgtattattacatattgtttaatatgtatttctgtataaattaatattaaataaagcattattgaatctctttctttttccatacatactcataaattgagtaaactttttgtttggaatttacaggttcgttgcacgaaaccagactctctggcaagatttcttaagatgttcggggataaataacattgaatttcttgagcaaatagttgtagttcatcagatacaaaaatagacataaaaaacgctatcctttcctatgattctagagaaagaatagcgtttttttactcgttcagtacttagtaggtataactttttatatttcaaatgacttttctctctaaaattatttttcatacaaattttcagattctaaaaaatctataaatttcttataatgtgtcactgttctttctaaagcaatcattaaaacaaatataaaataaattgcttgaattccattcatataattaaagagtgattcaaatatatatacaatacttgcaatcatagaacaaaaccataaataaaatttcattttcagttttttaattttttgcttagttgtcttacaaggctggccatgaactcttataaacaaataaattgctgtatgcaaaataataattgaaaattggaaacttcgattgtcctccgaactaaattcagagaaacctatttctaatgaatgtaatactatccaaatagaaaacaaagatagcacgaagacatataaaaaaccaaataataattcaaaaataaataaccaaggtttatttaatattgagtaaaatggatttagatattttatggttaataaaaatttcttcactaaatcagtaataataattgatgtattagttatattcatatagaaaagtaatgttattggaaccaataacattatagcaatgccccaaatggtaatcttaataccggataaaaagaaaacagctccaaaaattacaactgaaaaaataaaagttgatattggaacaaacattaaaaatataagagttcttattaagattaactcccctaaaaaatcttttattatgaaaacatgtattttttcctccttgtaattcttcacagtttcaactatttctttctcggataaaagaaaatacttcaatctattaaacataaaaaaactcctttatattaatttaaaaaagattgccctctgtatgctacagagggcaatctttcttgatgattaaaatatatacccaactgttagcaaatatattaaaagacattgtcatcaattcactttaaatttcacttctgggtatttggagtccaatttttcaagcgcagagctatcgtctacctgtttcacatatcgatcaaaaaaagcgagactgaattcgtttataatacggtgaacgtatcttggatcttcatctaagcttcgtaacaaaggagagaacaaatgaaaatcagtgaaactcgtatgattggtatggggaataaccattgacatgccaccacctgcaagtgcatggtcactacgaacttttccctctaaaaaatcttccgtggaatcatcactagtctctgcattcataatcaaaaacggttttccaactctagatttcggaacattttccccatataatgtaccatccatattgatggctgctttgacacgggagtcttccactaacacttgcgcagctgtagctccaccataagaatgtccaaacattccaattcgggatgtatccattcttcctgtaaagcgattatctttatcgctttggttaagcttctctatttgattaagtacaaaaacaacatcttccttccataatttgatatggcaatctcgttcggcaaaatcagttaaattgatcgactgtacaaaagcggttctgccatctggaaagacggtagctgcagcatcataggtatgatcaattcctacgacgatgtaaccttggctggccaactcctccacctcaaacgtgttttgattgcgaaaaccgcttaaaccatgggaaaagagtaggaccggataacgttcctctgaatctgacaattgagcttccatgaatgcattcgacttcatcaagcctagatgatgaaacgcgaatgctggaatagacaatgatttttccaaccccttggcaatctcatccgagttatggatataaggtgcgcgattcatctctcctttttcttttgcaggataccaaacctgaaccatcagctcgcgccggccgttcaaatctttcatataaggttcttctcgattataatcaatccaatgataaagtgtagtaccaaccttgaagggaccgctcgttttttcaaataaaactaccggcatgagggaaggaagcatgaccgcaatagtcaaataaatgaccagtagcgatgtcttgactgtgaatgccccacaacttttaacgttcttttttgattcagcaaatagatagcagcttgttaaaataaatggggacaaataagcaggaatcatctgccagcgatacccttctacgataagctgcacaccaaccacacaaaaggcaactgttagaatgaagacagaccattgttttattttctcactaaaaaacaatatacagcctagaatactaaaattcacaatgattataacagtctcaaaaaaatccatttacattcctcctatacccgtattttatcttcaaggacatcccagccaaattgaaaaaacaatttaaaattacaaacttttcgtttccatctctgattaccttaattcgtaccttcagtaccgaaaaattatttttggtactcattttatattataccgaaatcttccagactgtaaagtataattacccttaagtaaaatcgacataaagtgaaactttaatcagccctcaccaatcggactttaatgggcagttgatctcccacctaaattctttgctttcactgaattttgaggtaggaatcttactgcccattaaagcgggataaaaataaaaaatgagcgaggctacgttaacctgtatggttattgtgaccctactcattttttatgtagaagtactatttaatccttacttgtgattccatgcaatatgatatcggccatcattgcaagtgactcttgtagagtaatttggttagaggctatactcccctgttcaaaaattgatttcattaacgttttgagtgtttggattagcactggaatgtccattgaacgtaaaacaccgctattgatgccctcttcaactagcccagtaattacctcccattcttcatttatgccttgttctatttttgcccactgctctggatggtaacgtcgcagttcaatcagtaaacgtacgaagctgtgctgaaaatccttaggcacaattaaaagaatcccttttaatttttccggtatggtcaaattcgaattatcgataatttcccgaaaacgtatttgggcttcttcatttatttgctcaactacataaccaataagctcgtccttagatggaaaatgctcgtaaagcgtacttttgcttacacctagatcacgagctaaatcactcattgtgaattttattccccttacatgaaaaagcgcaatagcagttttggcaatccgatctttcatcatttattcacctcataccaaaatagtaaagttattatctctccagtactataatagtacttcgagtacaagaatagtttaactttttatttcttgaaggtcaaacgtgatgaagatgatgacatttcacctcatagcctttaaatgaaaatattatgttttttatggaaaccaagtttatttttatcattgcggggacatcaaaactttaacttgatagggatatggcactaccccaattaataaatattattaactatatgtctatcatattttttataaacaggactaattagatttaaaaaaagacttctttttctttactcgtaataaatcacctgtccatcctttgaatcgcatatacatatacatacccgctgttgtgaaaataataaataagagagcgattaaatagctatatttccattctagttcaggcatgtatttaaaattcataccccataatgctcctaaggctgtcaaaggcgtactcacagcagttaatacagtaagagctttcataatttcattcccacgatgagaagaaacaacttcttgcaaatgaatcatcgtgtctaattcttcttggtactctttaacaagttgtaatccacgctctaattttacgtgtgtttgtttataacaaagggtgtttgttagtttttctaaccaagcttcctccaagccttgtaacacttcttgtattaagcgaaacacatgtgtgttcataaataattcatgacgaatatgataaatcctttctaaaactgctatgttattataatgataaaaatcccataacacatttctgaaattgttttcaaaatagtcaacctttcgtaaatagtgagatataaatatcgataagatggcacatagtccttcagcggaactattacaattttttatacctatagggaatttatgtattaattcttgaaaatcttcttcctctttttcttggaccgttatcagtatcccatgagctacgaaataatgaagaaatttttgaattttggcgtcctttttatcttgatcatataaaaacgaaccatatacacaagtttgacttggtgataacgtataaacatataatccattttcacaaggagaacttattttctttacaaattgagggaaataagatgttacatcacgggggattatagaagaaatttcttcaagctcactagttttcacatgataccaactccatttcgtcatttttatgcattccatattattcttcctttctaaatagttttatgtttgatcgaatcatatccgtaatatgaaatttgtatgtaggtatccatatcttggaggaaaagtttttaaatcatctaaattacaaaataaatgcataggaggtcttattctttaaaaaggaagaccccctatatattagttatttttattctcaattttaaacatttcctctatacaagcactttttatcttttcttatttatatttggaaaagaagccacacaatttggcacgtctattcaacgaactccatttcggtcgtcattataatttggatttatatgcagattgattggtgatgtcctcaaatacttgacttccaataatatagtatccatgaagcgcggcctcttttgaagcgtctaccatacggaaagaaacaatttcaccttgcattttttcaatttgttttttgtggagatctactactcctcctgtccaaataatagtatcatactggtctaacttaaattgttcttgtaatacacgcatgatgtcttggaaatgtgtatccaactctttttgaattaaaatatccacctgacttgtctcataattttcttctttatctccatatcctttttctaatatttttggcatgtcattaatatgcaattgattactttcacccgcatgattctgcaggatattcttaatatttttcaaaggcttgctacatcctagttccgtctcataatgatttaaaatgacattctgtttcatatctgtcatttctaatgtacgaaatccaccatcaataattaagatgcgatcttgttcctgaatgattccctcttttaagaaataggcatgtaaagcgatcggttgctgaagaatcaaagcattttcaaccgtaatattaataaatttcccatcaatttgtacggaagtttctttttttagtgcacgttgtaattgctcatgctgactaccaaaacaagtgactggaagcccggtaacaactaaaggtaacacgacattttctttataatcctttgcaatgcaaccaaatatttgttgtttaaactgttcgctttcataataattttctatttcttcgtcaaatggaggaagaaatgaagcgtcagattgatgtgcttcatttcccatgtagtatgcaaagtctaagtctataaaacttacctttgttaaatcttcactttcagcatgattaggtacaggagctagtgtggcagcttcactcttaatcgtcacctcagaatctacatcctgtcgatatgcccgcttagtaaaaccaattcctacatcaattgcatacagagatttcatacttttttcctcactttctctttttagaattaaatctaagcactctcttctttcccttctttcacatatttcttttcattttccgttttttctccgtctaggttcttactattttgttttatttcattatccttttcatcttttttctttttgttattttcgttttctgttaaatctttaatagtagaaatgacaaccggtgtggctgtaagcagttgtggtaatgtttgttttgcaacattagctgcagttacagagaattgtttacttgtctcggttaccttctctaatgtttcctttatgtttccttcttgtagtttgtcttttacgctttttccttttgtttgtatagctttccgattttctttttttaacagagataccatgactccggtcgtaatcccaatcacagcatatttaaatattgtatgtttcatttttctcacccttctctacttttattttcttccatgctacaacctaaaataattaacttatctatttatcagatattgcaatctattagagagaatgatagttttgcggctgcctatcactcgccgttagtgtttcatctgttactagaagtaaaattctcccttgatctagtttttcttcatataagttagcttcctccttcgacaaccccatttcctccatttgatttcggagctcgtccccttttttggagaaaaagttgataatacttgtgcccaatccttgttcttttactccaatcgtatttgtgtttgtatcatccgcaatcttttttgttatatgtttttcatgtgttaagacgtaaatgtcatcttggtgaatcccttgcaattctagctcttttactttcataactacttcctgttcattttgatattcataaaccaccggttttctttcattcttatgcatcgtatttttcctcccttagattttttattttcttatttagttgttatgtaatatgtaatacacctattttaaagatgttaaacctaaattttcaaaaaacttcacataataggttattaatgtttttgaatatcaaggaaatgtcacgagcactttgctttgataacagtgttacaaataacgctttatttggaagacaagcctattgttttatagaaaatttcgatttaaaaaagttacaaaaggagtacaagatatttttttcgttaattaaatcaaaggaaaataaaaaaacactctttttaaaagagtgctaaaaaacatataccctaataatgtttctagtttaattacagaaagaaagtctttattaaaacatatagttgctaatttaattgcgatcttccttgcacccaagcagcaatatcatttataacatactcaagaatattagcaggactataatattcatccggtttacttatttctccatccccttctgtaaagaaatgatttaactttggatatagtcgataatcaatgttatctcgttcttttaattgttctttccatagagagatttcgattttcgattgaacttgatagtctctttcaccttgaataataaaaagcgatgtcttttgttcttttgacatttctgctgctttaatttttcggatggaattcttacttcacagaattttttgctgttttcactatatacttactatacaaatgaaaatatacaacgatactaaatatacaaactttgcataaaaaatgattttatagcctctttttaatatccatgcccactttgccagccaccgtgtccaccttgccaaccaccgtgtccgccttgccaaccactgtgtccgccttgccaaccaccgtgtccaccttgccaaccactatgtccgccttgccaaccaccgtgtccacccggccaaccaccgtgtccgccttgccaaccaccatgtccaccttgccaaccaccatgtccaccttgccaaccaccgtgtccgccttgccaaccaccgtgtccacccggccaaccaccaccgtgcccgccttgccaccagcctacatagccttgtctctgtgagttcattccttcgcatcccttcttattaaaaattcaaatactgtaactgggtattctctaaatataattatgtatccaaaaaataaatgtatccgcaaacatctcgattatcggtaaagtaattatctaatgaaaaaacatttatcattgcaaatctaagctctattgttttttacttttttttaaaaaaattccgctattttattagcatactttttagattcaaattcgtcatagttacttagtattgcaacagacaaatcattacttgggatcatttttcaacattacatcagaatccatagctgggctttagttatacaatgaaaaacgatacttcactattgaaatatcgcaaaaaactatttatttacattattatgattataatcctatccggtattagttaatcacctataattgcaacagggctaaacgattcataatgaatcaattcctttggtacttcccatttatacaaaattttaatactagcttccataaaaggaagagaaccgcatatataaacttgcttccttggtagcaatatttctctatttaaacaaactgcaagtaaccactcatccttagaatgagtggttactcggtatttttatataaagagccataaaaataatgtcagcatacgaaccatctttgaacctaatttggtttatttccccatcttcggtttacaccaccgaccgactctctaaaagaaaaactacttttactctttccttttatcgttttcacacaatatacattttaattatcatcactttacaataactctgtgtatttatcaagggatgttttttaaaataaaatatattcataattaattcacaaaatacattttctaatatatataaggagatctaatttcatctagaaatgttgtgttttgcataaaagccacgaagatataaataaaaaataatacgatttgcacgaaagaataaccatacaatgttatccctcctttaaacacctatttaagaaaaacttaagaaattcacttctaaattcataagaattttttcctatacttaaaaataagtaatttaacaaaaggagaaacgttcatgaagaaatttgtaatttttatactaggaataggcctccctatatacttactacctttcatattacgtggagatttagacagatttaatccgattgctgaagaaaaaaatgtatatgccgttgcgaaaggatatggtgttccagattatcatcataaaggaagagctatgtactcactaaaaggtgttgatgaattaagcaatgaaaaagaatataaaattggaacgaacacgcctaatgattttagaagaaaaacttacttaaaaattcatgtaaaaggaaagtatgtctattcttacgacgttatttctgaaaaggacattccggagaaaataagggtacaattggagatagcaaataaataaaagagccaattcatacgatttggctctttattctctctcccatctaccgtttggataattctttcggtagatttattaaattcgttatcattgttccaataaccattgctcaattacttttactgtttcatctcgttgtgcttttggcgtaattaaactcgcattatcacctttttgctcaccatacataccaaaatgagcatgattgcccccttttatcatgtgcatagttgtatttttggacatgaactttttattgttttctattttttctacagttgctaaagcatctacttccccataaattgataacatcggaatcgatttcgtagagaagtcatctgcaggatacgaacctaagaaaatgattccgtctaccttgtcttcatgttgaaaggcatacttagaaatcatagctcctcccattgaatgccctgcaacataccatttttgaacttccggatacttttcaattacactgtctacctcatttattccaagtatcgctaaatttaatggtaactgaggcattactacaaagtgcccatcttttgcaagagcttctcctaagtaactataagcctcagcttctactttagctccttgataaaaaataacccctactttcgcatctttcgctccaaaaacgatattatcttcatcttttttatcatctactaacgacaaagcctcttgcgtcggtttataagtaaactgagaccaagtcaaaaaagtaatacttcctataattaaaatagctagtaaagagtacagcgtaatttttatccatttcttcacaaagatgacctccataagatgtatatattccatatttcggattatcattaacacacataaaaactcgagcatttttattatgctcaagtttttatttacgcctttaatttatactataaatggtccaagataaatatgtagcaaatgcagtccataaaaaatatggaattagcaaccatgtcgatactttagataaattggaagaaaccgctatgagaagcaacgtagtaatagcgactagtaaacaatctattgttgctaaaaacaaattcttttggctaaattgaaaatagctgaacgcttgattgaatatataatttaaaaggaataaaaaccaaaatgtttttggcttaaatccatagttgttgtaaataattgctactgataatgcaataagtccaaataatacagcccatatcattccgattgtcataccaggaggtgtccaagacggcttttctaacgcatcataccaagtacgatcaatagggaataaaacactagaaacataaaacaaaccatatgttagtaaaaatactataatactagattttttcataaacattctcctttttaatagaaggttttagaaactctatatgattcgtatactctttcaatgaatacaactttaatacgcaaatagacattataacttttacatatcaaattcatattgactcgtgtattttatataaattctttcatacttttatatgcacaaagggctctctctcgtgctgccttatgatcaacaatcggataagggtatgtattcccaagttttatattggatttttgtaaaatatgctcaggtgcttcccaaggtttatgtatatatttgtttgggatatctcttaattctggtacccatcttcttatatactctccatttttatcaaacttttctccttgtgtgataggattaaaaatacgaaagtacggtgatgcatctgctccacttccagcaacccattgccatcccattgtattatttgcaatatcagcatctagtagtgtatccataaaccattttgcaccttcttgccacggaattaacaaatgctttacaagaaaagaggctacagccattcttgcccgattatgcataaaaccggtttgccatagttctcgcattcccgcatcaataaacggataaccagtttcacccttctgccatactcttaataactcctcttccttattccacggaaaatgttcaaagctcttattaagaggtttatatactgtaaatggataatggtatagtaaataataagaaaactctcgccaaattaattgacgtataaagctattaacttgtttttcaaagagactagattgtctttcagtacttttatttattaagtaatgaaacattagctttactgatatttgtccaaatgaaagatacggtgccaacatcgaatggacattttgatttggaaaatctcttccttcactataagaggctaatttactagagaaaaatttcttaaatgttttgtatgccccttcctctgtaggctcccatattgcttccatatgagatgtccacggtatagtcggcaacaagtgtaattctgagacagataagcttgctggtaaagagtttccccactttatactctgcactctgttaataggtttaggtattacctgcttttgaaatgcattgtaaaaaggcgtaaacaccttatattcagtgttatccttcttttttataatccacggttctaataataaatgcgaattaaattccttacaaataatacctttatcttctaatatcattttcattttttgattagattttaacctgtctggatcataacaactattccaatatacagccgttatatctaattgttttatgagagaaagtatttcttcctgtgtatttcctttgcggattattaaagtagagcccaatgccttaagttgcttttggacatctattatagcatggtgtaaccaccactttgccgcacttcctattgaaaaagtttcatcttgtacatataccggaagaacctccccggactgaacagcctcaaatagagctgggttatcatataaacgaaaatctttttgaaacataacgataattttgttttgcatggctatcccctcttactcttaaaacataatagattctttatgtgaataatcctcttttttacttttgcattattatattaataattctttgtaatcgtaaacaaacgtttccatagttattggacttctatctagtaaattcgataaatctgatgtgacttttttagctaaccctaattttgcagttgtatatattccaatcataacccaaataaagtcactgttaagtcccttttgaatcattctttttctaaatttaaatatacttggatttgtataagtaatatctttatttattatttttgaaataatagcagcaacttcataatatgttaatgcctcatttcccgttaaagaataagctttaaattcatgtccctcttcggttaatattttagctgcaacttctccaatatcccgtacatctataaaacttgtttcccctttaccagcaggtacttcaattattttttcatttcttaattcatcaccatgttgtgataataaattttgcataaaaaaactcggtcttaggaatgtgtaagggatcccagaagcctttatcatagcttcaattttagcatgaggtactatcggatttttttctacacctaataaagataaaaatacaatgtgttttatacctatttcttttgcggcatctacaacaggctggaaatacttttttgcatcagctagatgtggtggtcttattagaaagactttagtaacacctgttaaagccgcctttacagatgaggggttttcaaaatcaaaatacactccttcagtttctctactgcgcgttgtgactttgaaagtagcatttctttttattaggcattttacaacctcttttcctacattccctgtagcacctgttactaaaatcattttaatcaccctttatttttttgtaaattttgaatcatactttgcaaaactcgaactgtattttctacttcctctttaggaatactagctgtagcattttttataacttcatcgcttacattttctatctcctgtattaatgccttagtttcatctgttaaaaatattaaatgtgaccgtttatctttaggattatgttttataagaatccattctttttgcaataatctttgtataattccggttactgttggacggtctgctaagagcctttcagcaatcatagccggggtggttccatttggataaagagatatatcctttaacacagaccattgctgagctgttattttatattcttttaattgatttgataattctgttttcgtcattatacttaccttgtgtaataaatagcctaaattattcatataacctccaatatagttagtacactaattatatagttagtatactaactataatgtgtaattacaaacttcaattaatagtttatatataaaagatgtatcaaattcttattttgtactatttcatattatatttaaaatcttctttaatcctgttttgcatgtattgtacactctatatacaaaggttattccttgctgttactttaaataagcatttacaattgtatctagcataggtatttcttattatccgattagtcatatttattcttaattctgcaaaataaaaaagaaaatggagcgaaagatgaaaaaacaatttgataaacaatcaaacttaaatacatttattgattcaacaatcctatggacttttcaaaacaaaaatgctataaatacacttttgaatgaaggtaagcttatagccaatcctatttttgttagtaaagaagatttcacagcatataaatacattgtaagacacatgaaacagaaaggtattgactttactatagatttccccatttgggcatggcattcatgcaatggttacaaaaagaagcctacttttgagactgcaagggaattactatcagatattcaattagagaaagaaatatacctcatcgaattcacatgtcctaattttttatttatgttaacaaactatagcggatggtgcgacatttattttaaactcactggcaatcctaaagcaagtgtaacaaatgatgaagaaaaatacttatttaacctttatcctaccattgaggaagaatgggaatatcatcatatccaagcaactctaccctacctaaaaaaagaatggattatacaaataacagaaattagtaagatgaatgggtttaacaaataatattgtttataaatgctttatttaagcattcataaacataacaaatagtcacattaaactaatacatttaaaatagcgtttttttacaatggaaccctaaataaactcgttactactatgattttgcatacatgtagcttactcatttagttttggtctagtttgtaaatataaattcaaatccggacttgaaccgctaataattatatctcgaacaattttagaaagcaccatactatatactaatccattatctccatacgcatagataaagtgacaatttggaaactcttcatacattccaattataggtaaaccatcatgagtaccaccataaaaagcacttaaataaaattcaggttcaactgttatattgggaaagagcttattaaattcatttactaatttctcttttttatggattaattttgaatctctttcttgagcaatgtttgtatcttcatctaacccacctataataatcctgttatctgcagtagttctcatataaatatatggtctcgcagtttcccaaatgagagtacgtttataccaagaagataaatcttctacaggattagtaacaactgcatatgagctaatcagtgtagcgttcttttcctttttaaattccaacccttcatatcctgcagccacaattactttattggcagtaatagaattgcccccctttgtataaaagatagcacattctttctctaactttttgccaacaatctctgtatcttcataaatttgaactcctttattagcagcttgttctaataaactatgtgtaaatttataaggatttatttcaccatcattatacgtataaatagctgcacgttttttaaatggatatctctgtccaatttgttcctctgatagccaagtcgctttaaaatcatgcttatgtaaataatacagttctttttctaatttctttatatcctcttcataacttgcataatataaactgtcacgtcgtttaaaatcagagcaataaggcaagttttgatcagcatattcaatatcattaatagcttgttcacataatttcatatgcttaactgcatactcttctccaaatgtatttacaagttcaaaaaacatcttgtcacctaaatattgaataagtgctgtatttgtaaggttactcccgtgtcctacctttcttttatcaacgacaacaatatttaaatctgattcactcaaatagtatgctgattgagcacctgaacttcctgctcctattattagtacgtcacattttatatcttcttccaagcgaggataagaagatgtattagaaaaagttgtgttccaatataatttccctttctgtaaatccatttaaagtgcaccgtcctaaataaaatagttatatccccatctgtatctccaaatcattcttactatatacttcttatcaaatttatttttgctaccattagattattaatgcaatattttgttcacccctatatggtattaaactaggcttataaaaagttaatagtatatatattatttattttcatttagaaatttaagaacttggttaaaagcttcttcacctgctggagtgttcattttaaattgaaattcatgtgctaactcgccagagatatttttatcaaagaaaagtgtatctacaggtactcctttattttgtaaagtagaagctaatgctttaccttgctcttcaaatgatgcagtatttccatctgtgatgaacgttggtgggtaatcttttgtaacgtgtttataaatagaggcgatttccatttcaggtaatgtttcaaatttctttttcccaaagtaagcccagccagtagtacgcataaagtcttgcacttctttggatgtttccattttagctaatgcaggcatattatacgggccgcaaaatagcaatatacctttaattgtagaaggagcaacaacagcgtcaatcccggttaatttcgcataatctggagatgtttgaatagtaacaaattgtccagatatttgcgctcccgcagaatctcctgcaaaatataggtcatctagttttacattatatttctttgcatttgcttttatatattcataagcctcaccaagttgtagtactggtgtaggatactttcttttaggagcaagagcataatttatatttatcactgtataaccacgagcagctaattctactgcataaccagtaatgtctgatttatctccacctacaaatccacccccgtgcacccaaaaaataacaggtgttttccctataaaatttttgggataaataatgtctaatgtaccatcaggaaatttagaattataattgatatctttaacaattcgtgtctcttttagagcgtttttataattattagattgaacaaacattccaccttcaaatgctttttttatgagaaacgctttcggaataggtgaaacattccaaaaaacaacccccgcaataatcaatccgaaaacaataaaaagagttagcaacattctttttttccatatcactttaggttttaactgttttattctcataattaaagaatctccattctttttagtaataatcttaaaataaagtgaaactttaatcagccctcaccaatagggctgcccgttaatgcgggatcaatcacaatatacacttctattttacgattaactttattatcacctgctaatccgtccttaaaattttatgcaaaaagttatatatttttattatgtacatattaggtatctcctataaaacacattaaaaattcaaacaaaaagagcaaaagatccccatttatagaagatttcttttgctctttgtaaaggacacaagtccaaataaaagttgcttatctatcgataacttacacataagaatgcatttgtttcagtactttattagcaaaaactttaacaaccgtttctttttcacccgttctatcaattatgaaaccatgaacttcaatatcagaaggtactaatggatgatgacggatcatatctatactcttttcaatattttcactaacatttttttgtgcactcagccattgattaaggctaccacttgaaaattcaggcatgcaatttttaaagagatagtctaattctatattatcttttatgaaatcacgttgagtttgtagattaactgaagaagtttctttatcctctattccgacaacaaaaatttctttaacattttcttgataaatagcaataataatagatctcattatatctccataaggatgtacaattacagaatcatagctgtgtatagtcaacatgttttcttgttgaatgttagttacttgttggatactaggctctattccgtgttcaatgtctgttaataataaaacttttttattctttgaattcatatggagcactccttcttcattattgtatttatgaaacttttaagctagtaacaataataattgttaccagtttttccagcttccctctggatcaacacttgcaagtctaacccatccattttgaactttttctcgaaatgtgaaatcattatttaacaaacgttctatatattcaataggtgcttgaatgacaattagtaaacgaagtggtgaatgatacgtctcactatctgactgcataaccgattgccaaggtaagcctggcaacaggtcactagcattcccttgcataacaccgagacccgccgttacggtttgggttgttttatttccactaccataataatgaggagctacagttgatgcgtaatattgtagatttatccactgtgcaactgttcctggtcctgcaataatgttagctaatatatcgccactttcatcctgtttccaatcataattatgaaggaaagccctgccttctaagtcacaatcttgagttaattcacgctgtccgataataaaagatgcattacgcgctaatccccattctggacgtatttcactccaatcttctgcaaatcgatgtgcctctttactcggattttttattttcgttttaaaattaggtaattgcgttaaacgttctctatttgcatgttggctcacatttggcataatcgtctcgatacaatcaaacgcttcttgcgcagttttcgaaagttctgggacgtaaatccattccaattcgtccactgttgttttatgttcagctgctgcaaaaatggtatccttaggaatgttaatgccttcagcaaacaacgcctctctcacttctggaagattacataaagtcgcaaaaactcttgcattgaatcctcctgctgctccgccacaagcaccacactcaagtgctgcagcataagggttgttcgtactttgactactatgtccgcacattacaactaaaggagcaaatttttctgtcagtcccaccatttttaaagcttgacgcacatagttcactttttcttctttcgtaaaaccgataggtatctcaccttttgtgtcatgaacatgattaagcgagaatgttgtatcaggtttttgtaacatagttttacgaagtttacgaatgaaaccaccaactcctcttgggacaaagcttcttgtcaccatctgtagaccaagtaaaggaccacttaactcaggtagcgccatacttgtcagtacgttctgtttcatcgttttaaatgtataacgcaccgaactgcctaccctcttacgttgctcataagatttaaattcattttcatctgtaagctcttttatttgatgcttcggtttcagtataactggcaaggaaggatggctgtcattactacctagttcactagtcgcaattggtaacccaaagaaaccagctattccaaacgtttcaaacggacctagtttttctaagtggcgacgaaacggttctgaacgtacatcaatacaaaatgctaattgagctaatacacgctttttatcattggttgcgcgttgtttagaagcaatcttctctcttaattgctctgcatgcgtttgttcccaagcttccagccaaagtttcctgcgaatattttcatcaaaacgatatgcaaatgctaacaattcgctttgttcagctgcagacatttgtgaccattcccgtgttgaaatattcccccaatagatccaagaagctataagtgggacgatcgaaacttttttctcaaccttttgattttttaaagataaataaggttttgcaatagccagctccatagaaattcgaactgctaaatattctattaaaagcccctgttcctgaattgattgttgtgagcgccatcgtatcattcctgcccacccaggtaaagaaagtaagtgcccttcaagataagcttgtatgttagattcagaaattcctagttcaaataacgctctcgctaaagctacttcggcatcttgtggccaatcttttaaaactttacgctcatttttactgagcgctggatcaaatgtaataaggtgttgccatgcacgataaaaacctttctctcgatttggcatcgtccaacttgatccggagtcatcaagatataatttacaccatttaatgatatgataattaagaatatcagataggttttcactattttgattctctataagcgaacttattggctgcataacagaggctttcatatttgctgtatttatataactcatttcttctgccaatttatttaattctggcgatgataatagactagaaggtaatttttctaactttaaagccgcttggcaaaatcgctctactttctctcgcggaatatgaaaagattgtgaatccagccaacgagacaaactactttgtaaaaatgattcctcaatctcacctttcgcttttgccgaatgaatcatggaagtactaggatacatatccacattacgagcttcttttagccaatttgcgacttgttcaaatgattgcttttcaagtcccatccaagggtggtgagctgcaaacgtagagataggccaaagtggtgcaataactcggctagcagatgcaactaaatcatttatattattttcttgcatatcaatgtttgtatctttctttaatattgacgatatgctcatcacgaattacctccctttgatacataatgtttcagatagcttgggtgactttctactgattttcttctcgcctcacctactcgaactaaccaaagataaagtacagcgaataaagtagaagattgatgacgagtaacgaaagtactagtaacactactaaatagtaaaatacatataacaaagataacggctggagctgaaggttgaacactttgataaatatcagtatgcaaccatttataaagagaattatgaacggtaaagtaaatgagagaaaatccaatcaaaacaattacgccagcaattcgtcccattcttccctctccaaaaacaacaagctgtttccatgaaaagtatagtgaccagcctaagattaacgcactaactagttgatacccctctccagaagtcataaaccagaaagtaattgctataaataatcctaaaacacgcccgactctaatccataaattggacatcttttcattagactgattcactaccccaaaacgttgcactgaagaaccagcttgtaaaaacagtgtagctttaaacaaaccatgtaaaattaaatgaataacagccgctaaataggcgcctaatgcacattgaataagcataaatcccatttgtgcaatagttgaacctactagctgacgtttataatcaacttggactaaactaattcctgtacctatcaagacagaaatactagagaaaattagtaaaattatttgtgcaatatcatcatgaaaaagaggtgaaaatctagttaacatgataccgccagcatttactaaacccgcatgcataatagcagaaacaggagttggagcaacagcggactcaattaaccatctttgaaaaggccattgtgctgctggaatcatcaccgctaatataattaataagttaattcctgttctctccaatgttccatgtagcgctacattttcattcgttaaaactgatgttaattgccactgtccagttacttgaaaaagccaaatgatagctgatagcaatgcaatccaacttattgtaaataaatagccagagattttagttgcttcactaactactttccaccctttatttagccctatgagtagaaccaatcctataagcgttgctccccaacaaataatcatgaaacgaagatcatcacttaaccatgcaaccgaagatacacctgtagtaaatgtaaaaagtacaaagtattttcgatatgagcgatctcccattaagtaacgtacagaaaaacgctgaatgattaaaccaattgtaagaacaaagaaagccattaaccaagctaaagtatctagatgccaaggccccacaactctatctccattgttattaacaagtgcgagcaaagaaaccaatgaaggtaaagcagcgataccaatatggatatgaacaaaacgtaaaggtatccttgcatgtaaaaacaataatccacttagccaagaagcactaagcgccataaaaaataaagttaacagtgttgatgaactcagcgaaattaacatgttaaatactcccttctaagcgaaaataacctataaaaattccttttaattacgatagttttttaaatttcaattttcattcactctttttagtgcatcgttttttcccataaaaaaaaccgacaacttccataattcaatgattttatatcatcattgaattatggagattgtcggtttcccttcaactaacttcaataaagttttttgaagagctcccattttatagaggataataatgtatgtattactcctattaaaaagaaatgtatatttctgatctcctagattatgcaatcaatatatcaatttatgttatacgctatcttttaattaagaaactttttcatttagtcaatattacatattaaaaaaatgctaaagccttaattatagcaaactgttaaaatgagcatctatcaattttttaaaacaattataagataaaccatattaagcagtttgtcaatttctttatccgttttttaagagttatcagaattaagatttattatacctaaataacttcaagtttttaattattagcctgttaataaagtgtaaaacttgtaggtttcttaatccttccactaaccttaaggtatttttaaaatttctcctcaagattatgaagcaatttaaaaatcattactcgttcacctgtacgggagcttatatccgtatgaaagcttttcactttctctccagttaattctagtataatctctttcagatcatcaattccagattcaactagctccgaacgattcttctttatcgttagcatcccgtcttttgtttcgcaaacactatattcagccggcgttaaaacaccttgtaaatttacgataatcatatcccgtaatatatctgtcttaacggatatagacccgcgtcctaggtagtccttttcccagtgagtaattgctttgcttatctctgattcaatagagccttttgagcttttcatctatgtatcctccttcaataaaataaatttacaataacaatataataatccggattgattttattttcaattattgagaagaatttattgggattgttgtatggtatcctttcatatcatagcgattttttatattacaatatagatttttttgatcattcccaacaagatactcttactataaaggctctgttgcatagatttctaaaaaggacattccggagaaaataaggaaactcttgtgacataatacataaacgaaagagtcgatttctttataaaataggaaatcgacttttgcttaattattgatttagtaataaaaacaccttttaaaataactatgtttatactatagacgttgatctttttggaagtttagacgaaaatgatcctcgtcattatatacaccaaattcataccctttctctttataaaatttaataatttcaggaagagcttgtaatgtttgcgccttttcatgcattaaaacaacttctacttcttctgttgtctgtttctttacattatcgataatctgagttggattatcttttaatttccaatcatttgagtctattgtccaatcccaaacttttattgctgcttctacaatttggttacgaatttcctcgccctttaatcctggtgcagatccatatggcggacgaactaatttaggagttgtacccgtaatattatgaataagagctaacgtttctttcatctccgttacaaattgtccttttttgtatagcttatcactattatgtgtcatactatgtgcaccaatataatgcccttcttttactgctcgctttacgttttcctgaaaacctgtattttgtaaattgctaccttgcataaaaaatgtcgaggcgacattttgctcttttagtacatctaaaaatttcccagttagttcgctaggaccatcatcgaatgttaaataaacaacctttcccaccggttttccatcaggtcttttctgttttgctggtggtgtttcttttttcttttcttgttgttgcgtgttaacttgattactactttcgttagctattcccttcgctgggatagagttccattttcctattaaaaagaaggtgaaaaaggtcgttgctaaaacaactcctagagatattattaccttagttagtcgacttgtttttttcttactttgtgattctttcattatttttcgatcctttccctattaatttttatattcattatttatacagctgagcattaactccagctgatgtttacaataaatagattaatagaggaaggtgaagataaaatgcagataatgtcgaatttagttaaagaataacgtatggcatccactctttaaaaaaatatttgtttctctactacagttaaatttgaaaactggatatacatccaaaataaaagatactactctttctaaacaatattttcatatcaagataacaacatgctggtataaagataaaatacaaagatagccgtactattgaaattctattataattttgtaattggaattcatttgaaccaaatgaagaactagaagaaatattattatgtggaggtgccccgatgaaccttgtaattagagagttagaaacaaatgatttagataatctcccggagattgatgacagttttatagtgaatgctcggttaattctttctctttccaaaggaaataaacgtatagaatatacagtagaagacgttccgagttatgaaaaaagttatttacaaaatcaagatgataatgaagaactggcttacaatgaatatataaataaacctaatcaagtcatttacatagcactgttacataaccaaatcattggattaatggtattgaaaaagaattggaaccactatgcttacatagaagatataacggtagataaaaaatatcgtacactcggagttggtaaaagattagttgatcaagcaaagcagtgggcaaaaaaaggcaatatgccaggtatcatgcttgaaacgcaaaataataatgtcgcagcatgtaagttctatgaaaaatgcggatttgtaattggtgggtgtgattttcttgtttataaaggtttggatattgaaaatgatgaagttgcaatttattggtatttgcatttcaaatgaaactgtttttaacattaaacaaagtcaaaataaaaaccccaatttctctatattaaaattgagaaactggggttaagttatttaaccatattttttatttaaaacaaataactaattaataaccctgctgataataagaagccaaaaatcgtatttgtcatcgctgttgatttcattgcgatgcgcatatacccaggatcctttgcccctttttggaaactttgaatcgcagaaatcggctttctcaaacctaggaacataactaatgcccaagggcttatataacccattaatacaattacggcaatccataaatacgcaatgaaaaaggctaccgctagtgttaccacagctttctctctcccaaggaggattactaatgtctttcttccacctttaatatcttcttcgatatctctgatgttattcgacatattgattgcaccgactaaaattccaattggaatggaaatcaatacactttcaatcgttatcgtattcgtttgaataaagaaagcaatgagtacaaaacatgtccccattaacaatccagaaactaattctccaaacggggtgtacgcaattggtagtggaccacctgtatataaatagccaactgccatcccaattaaaccaataaccactaaccaccaactactattcatacaaatataaatgccaataaaagctgctacgacatacaataaaagcgcaactgttaaaacattttttggcttcaatccatgacggacaattccgccaccgatgccaacggattcagcagtgtctaatccacgtttaaaatcatagtactcattaaataagttcgttgctatttgcaatgctaaacatgcaaccatcatcgcaataaataacagccaatcaattttggcaacataaagtgatgccactgttcctaaaattacaggagaaaacgtcgccgttaatgtatgcgggcgcgtcatcttccatattaatttagcggaactaatttctttttctgtccccataactctgttcaatctccctacattttaagtataaattactagcagtatctttctatctatttcctgccacgcatccattcattatatcaataaatgattatcctttctaacaaatcaacttttaataaggtgaaaaattataaaatgaaactttaatcagtaggaattttgtcacccccactgattattagtacatatccattgtttttttacgggcagccctcccattcgttgaattttgtggtgggagtcttactgcccgttaatgcgggataaaaaagaagtcaaattacttccaaacaacacctcgcctctcatattccattctgtattcaacggcagccgcaattttagggcttgcgaatctttccgtgatccaaagtcccaaatcaactcctgaagtaactcctcttgcagtgataatatccccttgatccgcaattctgtaatgaagaagctctgccccgtattcactcatttcatcctgtgccaaatagtgcatcgttgcctttcgaccgttcaatataccagaggcagctaatagcatacctcctgtacacacaccagcaacaattgttcctgcattgtgcatctcgctaatcatttcggtcaaagtaccaagctctgcttgctttcgtgccccatgctctgctttatgattccagccaccaccaggtacaattaacaaatctggcctattatccattcgtaaaaaatcatgtagtttaaccgtaactccaaatgaagtcgtaacttcttgtttttgttcactcgaaacgaattcaattgtaaatggagccccttcttctatcgctcttttcagtacctcaaacggtgcgaaagagacaagttctccgaaaccatcaaacaatactatttgtattttcattttcggacacctcatatgctttcttttttaaattgtagatatatataatgattgggcaacctcaaagtgtaaattgtaaagtatacctagattattcaaataaaaaataatatcccacatagttaaatacatttgtaaaccctacattttccacaactgcaacagaaggcttgttcaattccatacagtcccaatatggaataatatcattctccaaacaatctttcacaaaactatgcgctatcttttgagctaattttctcccttggtgaccttttatcgtttcaatatctatacaatggatatttgcaaatacaaaacctgaaaaacatacacttacaattagatcatcataaacaacgcaataaccgattccctcatcgaaaaaacaatccggtgaagaccaaaactctaaaatttttgattgtaaaaaatcaatattcttaaatgtattgttattattttcatagagagctttactcattttcagcacagtatatccctgttcaaatttaggctcatgatgattgtcataatcctcttttcttagcgtatacactctttgattccaactctttaatttacggtgctgaaatattctttcaattgttttgttccattttgaatgattaccgattccttcaaagcaatctagtcctaccttcctcgcctcaggtactattacattattaataaaatgattcatttctttattaaactcttcatttgcagaatctccaatgaagaagaatccatcattattacctaaccaaataagtcccgaattaggagcagtactattatctacaaatatacgaccagggttcactcctgcaattacagcacgtacctctaattgaccttgttcattcactaaactattacacctataaaaatcattcttgcttagttcacagatcatacgttacatccccttttttaaactgttctattctaactttaccactttcacataatattctgtattattttcaagagtggttttaaagcgatgcgataagtaaatgaaatacataataaaaaagagccaatcccctataagatagaagattgactctttcctttatttactcccctgtttcagaaaatcgctttatacgttcaccaatttcatcacgaacacgttgaaattcggaccactcttttcctgctggatcatcaaatccccaatgaacacgatttacatgcggcggagtagatggacaaacagaatccgcatgactacacagcgtaacgactaaatcagcactatttaaaatgtttgcatcaattatatctgatgtttgatttgttatgtcgatatttacttcgttcattgctttaattgcatttggatttactccatgtgcttcaattcctgcagaatatacattccatttatcacctaaatattgtttgccccatgcttctgccatttggcttcggcatgaatttcctgtgcataagaaatagattgtctttttgttttccatgttgttttccgcctttgtttttaaattatgctggttgatcattaaaatatttacgcttaaaccaaaaagcgacgtttacaagtgcaatcattacaggtacttcaactaatggtccgataactgctgcaaatgctgcgcctgaatgaataccaaacaccccaactgctacagcaattgctaactcaaagttattactacctgctgtaaatgctaacgttgtcgtcaccggatagtttgcaccaatttttcttcccataaagaaagatacaaaaaacattacaataaaatagattaataacggaatcgctattcttaccacatctagtggcacgctaacaatcatctctccttttaaagaaaacataatgacgatcgtaaatagcaatgcaagtaatgtaagtggactaattttaggtataaacaccttttcataccactgtcttccttttaacttaactagtacaaagcgtgtcaacatacctgctataaaaggaattcccaaatagataaatactgattttgctacttctatcattgtaatatcgacaatagccccttcaatccctaaccattctggaattacagttacaaatacgtatgcataaactgagaaaaaaagcatttggaataccgaattaaaagcaactaaacctgccgcatactctttatccccatcagcaagatcgttccaaacaataaccattgcaatacaacgtgctaatccaatcataatgagaccaaccatgtattctggtttatcaggaagaaaaataattgctaacacaaacataagtaccggaccgataatccagttttgtactaaagatagaactaacacttttacatctttaaatactcggcccatttcctcatagcgaactttcgctaatggtggatacatcattacaattaaaccaacagcaagtggaatagacgtcgttccaacttgtaatgtatgtagtccgtctactacactaggaaacacaaaccctaaaccaatcccaacagccatcgctagaaagatccatagtgttaaatagcggtctagaaaagataaacgtttcattttattttccagctcctattaacaacaagaatttttttctactactttagaagtcgtacaacaagatggatcttctattttgtgaacatcactatctgcttttgtataaaagaactcccactcattaccatcgggatccgttacccaaaacttatcttgtactgcatagcaacaagtcgtatccatctcatcacgcgcaaagaaaccttctttttctaatcgttctttatgtaatgtaatttcttcagctgtatccacttgaaaaccaaagtgatttacttgatttccattcacttcatctcgtacgtttagcgtgaaattaagtcctggcgtctctaataaaaattttgcataatctactttcaccttaactggtgacacaccaaataccttttcgtaaaattcaatagacttctctaaattcgtaacgtttataccaacgtgaacatatatcatagcttattcctcctctttatatgttattaatcaattttttttgattaatagtgcaaaattttaacaacagctaccctttcctgtttttctaaagatacaacataattcttctgataataaattatttacttccgcatcatttagatcataataactccacgtgccttttgtttcttttacaattaaacctgcatctaataaaatctttaaatgatatgacaacttagattgcgtcatttcaaaaatctctgttaaatcacatacgcaagtctggcctcgctggcaaagttcatacataatctctaaacgcttctgatcagccaacgctttaaactttttctcatataacttaaaatcttgtgtcactgtagttcacttcccttcatcaactttttttgatgcttatagtatatacgctattgagtttattatacaacttattaatcaattttttgtgatttagaaaaacttcctcccattatatctttgctacaactaaaaaggaccccagccttttcaaaaatgaaaaactacggctttttttacaacttaatagttacaatatttccgagaaatggagtctctataactattttaaattttaatttgatcattatagagtagtgccccatcaccatcaatctaagaaaaacaaataccccaaaatgagaaaaattgatataactcttgtttttggtgcatattcataaaaagcacgttactattctcttatgttaatgagaatagtaacatgcttttaattacaaaaatagttttaatccttaagttgatggttgtggggcggtaccctatgcccatcaacttaagaaaaagaaatgcccccaaaacgaaaaaatgagcggcttctcagaatagctatctgtagagaaagaaaaatttaatttagggggatatgaaagtattagcttgatggtaatgtggcagtacctcatataaagaaattttaaacatcttaatctgcctttcctttatgtaaatatgggaataacgaaattaccccaaggatagctaaacaagctccaatccatagcggagatacaaaaccatatcctttactgatcccaagaccacctagtgacgaaccaataacaatacctagcgtaataaaagaactatgaacggtatttatcattattccattactagctgtcttcatcaccctcgcaaccatagctggattcaatgctacaccagttaaaccaataaaaatcgtagaaataactgcaatgtatttattctctgcacttaaagcaaataaagacaacgctatgattaatataattaatccacccataagtattttcattgtaaatttatcagcgaacttgccaattattatattcccaattactgtcgcgctaccatagagagcaagtaaatatggaatacttgctcttgaaaaccctgtaacatttgtaaagataggagtgaaataactaaatgcggcaaacgtaccaccaataatgaacatacttgttacgtacgctgcccaaagatgaatattcttaaatcgcagaagttcatctttccaatttaattgctctttatttgaagaggatggtaacaaccgttgaatcataattgctgatactagcacaagaacagaaacagccccaaaactaatacgccagccaaaatattgcgaaataacggttgttataggtaaacctaatacagttgcgaacattaaacctgcaagtacaattgatgcagcttttccccttgaatcagagtgaaccaatgtcgcagaaaaggaaatcgcaactccaaaagctgaagctgaagcaataccagttataatacgtgaaatcatcataatatcatagttccaagcaatagctccgagcgattgaccaattaaaaatatgaacattaaaaacaataatgcttgtttgctgcgcattcgtaagaggattgcagttaaaatggggcctcctattaccattgctcctgcataagctgaaattaaatacccaatggatgatacagaaacctggaatgcaagagcaagttcattcatcatacctgcaaccataaattctgatgtagtcatacaaaagattgctaaagctaataaataaataatcgatggcataaaaacactccttatccattactgtaatgatcggtacaaaaatagtgcgaaaaaagggcgcactaagcgccacaaatagactctactgttcctttgataacttgttcagacaacatccgattttgcatcgatacattaagaacacggaatccgtaataactgcttaaaagcagactagctaattcttcagctgattgcttctttgaaatttcacctgtttgcaatccttcctccatcactgtttcaatagcttgtttaagaagttcaacatgcttcgagaaaatttcttgtaccattaaatcgtttttagcacgttctatactggcattaatcaataaacatcctttttgatccatattctcaaagtcttctttcaatgcccattcaaaaaaattacttaatcgttctttaactggaattggagtatgtaacaatttcttttgttccctaatcccaatttcatggtagcgttctaatacttgtttatacagttcatgtttactaccgaaagtattgtataaacttccttttccaagtcctgtatcactgcataaatcttgtgtagaacatccttcatatcctcttaaccaaaatgttttcattgcaacatctacaattgaggaataatcaaactctcgaggtctgccgcgtttattcaatcgtatcctcctctcattttaaagataatatgaatagaataccctttttgtaccatgcggtcaataattttgttttaatgttactgtaaaataaaattggattattttagattatgaataattaaaaatagcccccttattcaaattgcctagcgaaaaaatcacgttttaatagatttctttatcatctctacctttctatagattactagttatgaaacgaggatcgtttcataactagtaatttacttaattagcttgctggttatggagtagtgcccctataaacaaaaccctccagagacatctataatctgccctgttacccagcggctatcagaagaagcaaggaatgctactacatctgcaatatcttcaacttgccctattcgtccgaacacagatgaatccgtagcaaaattccgtatttctgaatcatctagcaatttcgcattgatatctgtcttcgtatatccaggcataattgtattcactgttatacctcgttctccaagatgtttagctagaggaagtgtcatcgtatttagtgcacctttacttaaaccgtatgcaatggaccctgtaaaaccaagtcttacttccgctgatgaaatgttaataacgcgcccttctactcgtagtaacggtaatgtttgctgaattaaaaagaatggcgccttaatatttacggccataatttcatcaaaaacttcttctgtcgtattttcaatcgtcccttgtgtacctatccctgcattgtttactaaaatatcaatctctgatgtaccaactcttatttgtaattcattcttcaattgttctactatttttttgacaccatccattaaattgagatcagcttcaattaagaatgcctttcctccattagattcaatctcactaattgtttcatctgcaactattttatttcggccgtagtgaatcgcaactaatgcaccgtcgtttgccaatctcatcgcaatcgcacgaccaatgccgcgacttgcccctgttactaatgctactttcccatcaagattcttcattttttccatccttcctaaattcccttttgataaaccctatacttatattttcatgcaaatactaatcattttaaatatagatttataggtaatttagttcgttcacttatgatattatagttataatttacaattcactttagaaaacataacaaggaggctacacaatgcaaaacgctgtaaaattggatgaaatcgatcataaaattatgaacctgttatatgaaaatgcgagaatttctgtttcagaaataggacgaattatatccatgacgcaacctgctgtaaaagaacgtattaacaagcttgaagatcaaggagttatagcggcttatcgaacgaaatttgagcctgcaaaaattaataaaaacattcaagcattcatcatgtttaaaacgagccaatgctctgattttattcaattttgtaatgccgctcctgaagtaacagatttataccgaattagcggggaatttaattatatgatgaaggtcatgagcgattcgatggattctctcgctacatttttagactctttaatgcaatttggattatcgtctcctttaattgttttaaagagtgagtttgaggagaaattgtcgttctaataaagggatacgtattatccccggctaacagtaaaagtttttcctttatgagaaaagccaatgaaatcaatgattagtaaacaaaaaaagaacattgatatttcaatgttcttttttatatctctacttatgaattagatctctattcgaaaaaagcaccttaatccccttacccctgattcctctgcgcctctctaaactcctccttcaccttctctaacaacccttcttccgtaattaatcgatacgccgtatttgctaatgcttttgccgatgtaattaatgctttatctccaagttctgaacgtgctgcttctctaaattcattcgtatgtgcaattaaatcatctggtccgattttaatgtacggatgaattgtcggtacgacttgacttacgtttcctgcgtcggttgaaccaatccctactctttctttacgatttacatcttcacctaatagttctagttcttccgctacgatatcgttatatgtttttgttacgagtaattcatcgatttcattttgaaattgatggatttttacttttgcacctgttgctaatgctgctccctgtgcgatattttttactttttctgttacttctgcacatctttttcgcgttgctgcacggatgaagaatcttgttgcggcatagtcaggaataatattaggtgcttttccgccctcagtaataatgccatgaattttcacatctgacggaagttgttggcgaagtgcgttaataccgttatagagctgaataaccgcatctaatgcgttaatcccttcttctggcgaagctgcagcgtgagctgtttttccgtaaaaatgaaaatcaagtggatcgactgctagtgaaggactcgttgtcgctgtctttccgctcggatgaatcataagcgccgcatcaatgtctttaaataaacctgcctttacataacttgatttcgcgctaccatttggcccgccttcttctgctggcgtaccaaacacgacaacttccccgccaatttcttcaagcgtttctgataatgcgattgctgctgcaacgctaattgtgccaattaaattgtgaccacacgcatgacctagtcctggtaaagcgtcgtactccgctagaaatgcgattgcaggtccttgttttccagagctttttcgcgcgataaatcccgtttcatgtccagctatattgtgctgcaactgaaatcctgcactgcctagcaataaacttaacgttctagatgcataaaactcttggttaccaatttccggattcgcatgaatatcatgacttgtttctatgtacttttccttatttctttcgatactctcttcaattgtttttctttgtgacgctactcctgtcgctcccattgttcttcctccttttattttcacataaaaaagcctctttctaaaagatagaaagaggcttctgtatatacagtcaaaatgagcttctttcttatctttcaagttaccttgctggaattggcacagtattcctaacgaatccgctgccgaggtatcatagggccagtccctccacctctcgtgataagaattttcataaaattatattaaattattttttattctaagttcattccaagtaaaagtcaaggaattcctatccgaatttaccgaatatctaaaaatccttttaatacaccaattgtctcaggtgcttgcagtcttgcacatacgtacggaaattccgtactaccttcaaacatcatttgagatgtaagcggtgcgcctgcccagaagatttcatcatcaattacgataaacgggaatgctttattttgtctttgtaactttacatttttcagtggaactggtccatcactataaactgttatttgcgcatttgtacgcattaacgcttgccatactcgcttatccacttgttttgtacttggaagtgaaataataatttttcgttttgaggctaaaatatcttttaatacccctttcgtttcctcaagattcatttccataaaccagcgtaaacgtttcgaaattttccgttcccacaattgtcttgatgtcgtacgatcatacacatctccgtgacgttctatatgagctgttaattgtgataacgcttgttttctcgaaaggtttttacacatataatggcaatcagataattgaatgaacttccctctcgcccttgtcactgctacattgacgaggcgatggtttttgtgatcaaagaataatatgccaggtcgttcttgcggataactgtcaaccgtatcaaagatcatcatatctctttcagaaccttggaacttatgaactgtcgccgctaaaactggtatgttttgatatttcgttctctgcaacatttctctaatacacgttgataaaaagcgtgactgcgccctgtaaggtgtcacaataccaattgattgcacaccatctaacaatccgattaacatcatttgcattgctactaaaccagacataatgttaaaacgtgaaccagaagcagcatcttttaacgaaaaagctcccatttggctcgtatcaaataaaacactcgcttcatttgcgaacggctgcaattgcgcaagttctttacgctctgaaacagacggatgatcgtgtactctatttttataaataaacgaattcgtaaacttcgatatatccgcatgcatacgtctttgttcctgcaacataaataggtttgggtgtgcttctgatttattaacagactcaacaatcccagcatggtaaaacatatcttccccaagccatttacgaacgagttcatgatttgccatcgcaattggaggtaactgtaaaaagtcaccgcaaacgacgatacgttttccaagtgaagcagctaatgcaatttgcggaacatatgccatacttacttcatctacaacaactaaatcaaatgtacgctcataaataagtgaatcaatggcacattttgataaagttgcgccgattacttttgcattttcaatatattctttttctacttctttaattttagccttttgctttcgaagatcactttcaatctcttgtatacgcttcttatcagcagatgttgctttatacgataagattttttcacgaagatcttgtcgtgtctcttctaaatagagtctttcctccccccaagatccgttcgtcgtttcaactaacttcgacgcaagtaacgtttcatgatttcgtatatgttcatgttgactataaccgtaacgaacaatttcaccaggcgtccatttctttttcttctcaatttgcttcgttacttcactcattaatacgtctactgccgcattactatgagccaacacaagtaccgattttcctttttgataatgagccgaaataatacgtgataaattgtaagacttccctgttcccggcggtccccatacgtacgttgtcggattataaaacgaacgatatgccagttcattttttggatttttcatcttctcaatatgtttcggactgctcgtcccatcaacaagacgctttatacgattacgtttcagcttatctttacgtgcttctttcaatcgctcttgtagttgctctaacaattgccacggttcactatataaaaccgcttctcttatttcaccttgtatataatcatttaatttcagctctatttctaatccatgtatagataatacttcccctgtcgcttcctcaccatcgaactcaattcgaatgggtgaaccttcaggtaagcttacttccgaaataagctgaaatacgtatactgtactttcataatctgtatataaaaaacgaccgttcatgatagcaattttactaccacctatcgttttccaatgtttaatttcatacgctaatgcataatgccactctttcatcgtttccgataatgaaggagtttgagtagttgtattcatcgtataatctccttccttctccccaaacatactttctcactataccatataacacgctaaaatttgtaaggtttttatcttgcttattttcttaattttcaataatatattgtatataattttcagaaagaaggaatctacatgccagttagaagaattgaacacgttggacttatggttgcaaacttagaaacatctatttcattttatgaagaagtagtcggcttacagctcatgaaacgtatgggtcatccgaatccagacttaaaactcgcttttttaggtgtagaagaatcaaaagaaacgatactagaactcattgaaggctacaactcttctcttccggcagaaggaaaagtacatcacatttgctttaaagtggattcattagaggatgagatcgaaagactaaagaaacaaaaagtaacctttttactaggagaagaaattgaaacattaccagatggaacacgttacatattcttcgctggccctgatggagagtggattgagttttttgagacggagagataaagtaagactttattttgcgggatagaaaaggagccggaattccggcccttgtttttaacgaaacatattttattataggaataaaaatctttctaatagctctaacttgcacaatgcttcccgttaatataatacgctgattctgtgaaaactgtaaatacaacctctacttctggaagtccaaaatccattacatatgtagtaatggccttggcaaatcgatcacgaatttcctgtccacgctcgaaccatttcacttcaataagaggaaacgcttctatttcttctccattgaatacaaacgtagaacttggtaattccaaggtgaaattatccgtaccacactcacagatatctgcgagttcttctactaatggcttgcttatgctttttaattgttcagtagtaattccacgaaacacaacatgcggcatgttattccctccgttacatagctttatatttcctcatatcataacacaatttattttgctgcactaacatctattcgtacatttcaatgacattcttaagaatgatcatatgttattgaagctaatataatcaggagttaaggaaaagcagactgatagaattaaaggtgaagaggtaatacttgacctcaattctaatcgtcatataatcaatgccatgcacaaaatgactcatcaaaaagtattatctcatgaaaagcaaggatttattaaaatgactccagaaaacatcgaagcaatacgttgagtaattgatgaaaataatagtggaaccttacaacataaagaatagtacctcaagattttgattggttggtatgaaggcgatttctcccttatcgttttatgatatgctaataacatttgataaaatatggtatctatagacagtcaaacatctttaaagatacctcgtccagttcttgctgttgcaagataaacagcatataatcagttaaccacccacattagtaacgaacacataaagaaaaggcattccaaatatgaaacgccttctttcgttttataaaaccatccaacacgctgaacttttcaatttaatataatcactcgtttaactaaagaaattgattacgtgcataacgctcttctcacttttcttgcaaaatttagtgggtcatcaacgtcttcgatattaacgtaaattaaatttggatcatcacataaccactcattgtgtatagacgaaacgattattccttgtttaataattgtcgccacaaattcagtgacttctttttgtaagagtgctactcggcctaggcataatgcccgtccagttttattgtctcgtgattcgaatgaaaaggaagttgttactctaaaacgttttcccaagattgttgctcgtatttcatctcggtttattgttgccacgcatttcccaccagcgaatccttcttgaccgccaatgattcttgcaaactgttgacaaattgattcctcattaaccgccatacctttaatcattcctccttttactattagattatgaattcatacataggtctgaaacggcaatgaatctaatctattataaaaaaatgatggcgatctaccgaaagctattaactcaattattcttgatcgtatgaattgttatcagagtttaaatggtgcagaatttttattttatgcttaatggacatcggagactgaaagcaaaactcagctattataatggtaagacatttttaaagagcataaaaaagacaccctaaggtgccatcctccgacttgagaattatatctatgtatggagaaatttagaaaagacaaatacaaaagagaagattctaactataatttatagaactcttatgccatgacttacttacatatttccttatttaccagaagaagaatctcagttacattattttctgaacagtctcgttaaagccataccaagaaatccagcgcccattcctattagccatccagtttgggcattacctaacatagatcccactcctccaccaagaaacatacagccaacgaatactaatcctccaattccccaattcggccgttccataattcaatcacatcctttcaataaaatatatgcgattagctaactcaactttcttccttaagatagttcattactttgcttaggtttagcacttcagggaattcataagatgcgaagcttgagtcatttatacagattgtagaaatacgggtatcaatcgttattaaaaataactgacgcattttaaacatcatcgattttatcattttggacaacctattctgttaaattgatatacatgcgaaaaaactatcaaaataaaaccccagaaatccaaaggtctctggggctccattatatatttagctctttttgctttttgttttgtttatgtctatacagcaattttcggcttattagagaaatcactaataaggtcagaattaataagataagttgcataaatgataaatcaaaatatttagcacctgtaacgattaaaagtgtagaaatcgtgccttttacaacgaaaaaaataataacccataatccgccttttttccagttcattttatattaccctttcctacgtttaaattcttaaaatatttaatgatagttcttaaatgtgacaacttaatagaaatctattatattaacaaaaaattcatgtctaattaaatgcaatgattctatattaagtgaaaatgatattcattgtcaattttattgactatttgaatacttattatttctttctactttgtttcttataagcaatacgctcttgtattcaaacaaaaacacctccattgcatttgcacacttagtatgcgaatgcaagaggtgttttttcatataccatcaggtaagatttcctgctttgtttatttcttgatacgtagctattttttaatacacaataactggatcatacgtgttcaaactatcatatacagtttttgcaacattaggaagaaggttcacacacccacctgatcctcctgttaaataagcattatttccccagtctttgcgccagccggcatcgtggaatccttgaccactatttgtgaatgggacccagtaatctactttaaccgcataatcagcttttcctactgcgttacctcttagcgtatatggtgttcgtttatataggacgtaccacacacctggtgatgtatcttcaccagtactatgtttaccagttactacatttgttgtaacaactaattttccatctttgtaaatccaaatttgttgctctgcaattgaaacttctgcatacgtgtctccgatgccattattcgatgttgttttataaccgatgccttccttctcccaaccattcccgtgaatattagaagcagaaagcgatttttcgcctttctcaaaggcttgttgaacttgtttagtttctttttcaacatctagtgcccagccgtatccttctccttttactgatatgactgaaccggaatgagttttaaatgagaaatctttatttaatgttgatttggcattattaatttcagtaattttcttcttaatgtcactcgcatcaattgtaactttcatatcctttgacatagaggcattttgaattaaatctttcgcttttaaaggataaacttcatcctgcactttatactcaacagactgcccaagaagattctgtagtgctttctcctcttttttgacaatcggatcgtcttctttaataggttttatgtatgcagacttcagatgaatttcgcttttatatttttgcttatcataatctttcagtagactagtaacatcatactgttttccttcaacacttttcgaaataacaattttcccttgttctagcttcgccatagcatcttgaggcgcttttaatttctcattcatagagatgagcttttcttctacaagttttttcaacgtttcactacgatactgatctgccttctctggtagcaatgaataattttctacctttgaggaagggaaaaatgtccactggttttttaatagtttcttaacttgaggcaaatctttttccgtaagttccgtttttgtatctttttcatctaaaatttgttgttgatcaacatagactttgtttgctagtccagatgtctttaatttctgtattgcctgatcagcgctcagaccaccaacttttgtgtcattaattgtaacattcgaattgaagtgagttgcctgataataactcattcccccaataagaagtgcaattacaccaatacccgctgcaataaacttccaatttgtataacgtttttttgatcttactcgtttttgatcaatttcttcaactgattcatttgttgtattgttgttcatcaatctttcccccgtatgcattaacgtcaaacgattttcaactaaaatcataaactagtgtaccttatttttcctaaaatttcattatttccgaccacattttatcgcaatttaatgattaaatttagatttttcaatagtacgatgcattgcacagccctttacaagttataaaatgaaatttcaatcaaccgttataccaaggaaattaactacatcttctttggaaaactttttctctttacgcaaatacgaattatattatccattttatgaacatcacctcctaattttgtcaaaaaaataaacgatagtccttctatctaaaatgtagaaggactatcgttttttcagttagagtatttgtataatcgtttaactttttatttcctgaaggtcaaacttgatgaagatgatgaaatttcatctcatagcctttaaatgaaaacattatgttttttatggcaaccaagtttattttcttagcttgatgtcccccacatatccagcagcctaagatgaagtaagagtctgttcaactagattttttctaatatttttaggagcatcttatttcgcctcgtcatatttcactaattgaatttaaaacacatccgtatgctatttagtaaaattcacgattcgagacgtaattattgcagtaatcaagataatactagcggttatcaagccagattctccaatccaaatctcagtttgataccctgtacttgcacgtgtgaaaggtccttgaataatggcattccaagtagcatggatgataaccgaaggccaaatgctgcctgtgataagtcgtaaataagctataatataaccgaatggtacaatacaaagatagataccaagtactgaaagaacgacagatggtcccgctacatatagaccagcaataactattggaacatgccacgttgcccaaatcaatccactaataaggatgggccgtgaaaactctgcatcgactagccttgtgagcatataacctcgccaacccatttcttctcccaaagctgggattaagccaagcaaacttccgaaaatgccgctcaatactactagataaatgaagctgaatggtgccgttacatactgaagcccaagcatattgtagatcggttctaaaataaacataccaacttcgggatactgaaaccccgcaattccgctcaaccaggcgatagaataagtaattccacaaataatcatagggattagcagagcaaaaccgatccccttccatatctttaagttaccgagactaaaagatacatctttaaacccttctttcagtattatgcgagtcaaaatagaagataatgctggggtaaacatatataccacaataagtggcatacttttcgtaattattactactacatttaggataattgaagtaatgattaagatactcagaaaaagttgaagtcctattttagcacgttggattttatctttattgtggaacgattttgcgtttaatatcattgtaatccgcccttcccctataattcacttgtttatcgaatatacttcttgtcatttccacagacacaacttagaataaaaatatttttgtatacaaattcattcatctttaaaatccctcccccatttataatctagtcttacttacgactcatcaatgtaattattatttataagttgtcatagccgatagtacaaaagtgtaatgattagcatatgatctgtgtcaattaactttatgacaatatgtaactagaaaatatgatatgggatagataacaattgaattaaggcaattgattcgtgcaagtacaatgaatcaatcttgcttttacaaataattcaattgaggtggaaaaaatgaataagaaaagaataattgcaatggttagtacagctttattagtcacaggatgtgtagaagtaggaaaggctcaaacagtagcagtcgaaaattcaaatcaatcaatacaaaaaaatatagttaaatcaatacaatcacaggcttatccattaaaaacgatagagccgtcaaaatcatttgaggatttaaaaccacttaagaaaatgattgggagcgcacaatatgtaggattaggagagaatactcatggaagctctgaaattttcactatgaagtttcgccttgtgaaatatttggttactgagatgggttttacaaacttcacaatggaagaagattggggaaacggcttaaaactaaatgaatatatccaaacaggaaaaggaaaccctagagaatttttaaacttgttatatcctactgatgaaattatagccatggttgagtggatgaaagattataatgctgatccatccaataaaaaaaagatccaatttattgggctcgacttaaaggagttggaccaaggttgctttaataaagtaattgattatgtaagggtgcatcgaccagatttgctggcagaagtagaagaaaattataaagaattgccgtcttttactggcagtttacaggaatatatgaaacttgctcctgaaataagagaaaagttcaaggcaaacgctgagagagtagcccaattactaaaagatgagaatgggcaagccaacacagaaatagcttcacccgagtacatctgggcgaaagcaacggcaagtgcaatagagaaatttaccacaatgctacttcctaacgactttccaagtctgttaaagctacatgagcaatacatggccgatcatgcaatgtgggcacaagagagattgggtggtaaaacgatagtgtggacacacaatattcatatggctaaaggaattatcgatgaggaatcatacccttatgcctcggggcagtttttgaaggaacgtttagacaataattatgtcacaattggcagtacaactacggaggggaatgtcaccttatacaacgacacccaagataagattataacggatctgattccacaagatgtaaatagtttcaattataccctcggaaaagtaccatatgaaatgtttttattagataatcgtcaccttaaaggaccagcaaagaaatgggttaaagcaaaaagaccattactcagtataggggcacgactcttaccgaacaaatctgtatactttgataaatcattgcttgagcaatttgatattatttttcatattcgaaaaacaagtcactctcatattaaataaaaatacaaaacaatcccgttcttgcagatgcaaaaacgggattgttttatggagattaatatacgcatcttttttaaccagaagtaggttgttctcccctttttaacatcatttagaaatgtcatatgacacttttacactagtgagaatgacaaaaaaagcagtatgattcggttattatatagataggagcgatgaactttatgaaatcaagattcatacagaatggttattttttattgctaactttcgttacagggttgttttatttttgtttttatctaatagctctgctattcagcttcaccctttcatttacggtaattgggattccactaattatacgtgtactacagactactacaccttttattcaattcgaacgcatacagacgaaaatttatacagatatttcaacagactcttatgacagaagtataacaatagatacatcgaactggactcaggtgaaattagtgcttactgatcgtcgcacttggtctgctgtcttttggttaatgcagaaattagtgattggcattttcagtctcattagtacaatcattttttatgtaatgccacttatgttcctgttggcaccactactgtatcgctacattgaaatgaatattatattcatacagatagatacttttgccaagtcactctttgtaatgtttatgggtatagtatttaccgccataagtattagaatagtagaacgtttgacaaagaaaattggtggctatacccgtagcatgattcggcaactaaatcgatagaagtttcccttttgcgagaaaattgtagtgtaaaattaaaaagtataacaatgtatgaaggattaatttataatataggaagtaaaatggtaggctacttaggggggggaataacttgttagatatggttaagtattggttttggtacgattggattatgttaggagtccgtatacttgttagtgtctctatcgtcgtaatcacgttagattttcagaatagtttgacactaccactttggattattattttttgggaggttgttgccttctctattccatgggtagccttactgttcaattacaaatattacttgtccacagaaatactgctatatggtggactgtgtatatatttaacctccttatttccggaagctaacaagacatttcttatatcggtgtttctaattgctgcgaatagtaagcatttgtcctattattggacagctccaacaacagtttttataacaactggaattctctatgcggttgcaccaagtaatagctattggattatggttacctactatggacttgcttatgtaatgggattcgctttccatttactaatcgtcaatcataagcaaaatgaagcgattcgtaaacaaaacgcggtacttgagcaatatatgtctcaaattgaacgcattacattggcagaagaacggaacagactgtcgaatgagcttcatgatacagttggtcacgcttatacttctattattatggggatggaaacgttgcgtaccgaacttgctactgaaatgggtatacagaggctagattctctgcttgaaatgggacgtaaaagcatcgaggacgtgagaggttacctacatcaaatggattctccatgtcaatcgccttccttaattcaatctctacaaaatcttggagccgaatttcaggagcacgctcaggtaaatgtaagttttaggacattcggagaggaatatcaactatctcggcaagcgaagatcacattcattcgttgcttacaggagtcccttacgaatgcagtacgtcatggtcaagggactgaaattatagtttcattgcagtttgaacaacaatatacgaggttagaagttcaagataatggaaaaggaaatgtagaatggcaggaaggcttcggtatgaatgcgatgaaagaacgggcaatgaacttgcaaggtcatttgtctgtatatacaaagccagaagaaggaatgcttgttacatgcaccataccgcgacaaactgaaataaaaaatggacttattcgtttgttaattgtagacgatcagccatttgttcgagaaagtttgaggacactactcgatagatatgaagatttaaatgtagtcggcttggctgaggatggcaatcaagccatcgatttgtgtgggcgccttcaaccccatgttatacttatggatttagatatgcagcacatggatggaatcgaagcaaccaaaaagattaagcaacaatggccacatatccgcgtattgatttttacaacgtttcaagataccgaacaggcagtggaatcacttcgcaacggtgcggatggttttttacttaaatctattgaaacgttggagctagccaatacgatccgacttattcacaaaggtgggacactaattgatcagggaatgtctcacaaaatatttgagaagtttgatgagaaaaaagagacaccacaatcaaaagcaaccgcttatgagctaacagctagggaaatagaaatattacagctagtagcaaaaggacttcgttacactaccatagcatcaaggttatatttatcgaatggtacggtcagaaattatgcttccacagcttatacaaagctaggagtcagtaacaaagaagaagctgttcaaaaggctctagaaattggaattattgaataaaaaagtgttttttgtttctttacagcaagatgaaatgtagttacaaaatacatagaggataaacttatgaatttaattggatatcattttttataggtaaatttcttgaaaaatttaaccctgtttaaaaaatttaaatagcgttgctacatattgaatgtagcaacgctattattttctatattagaaattagacatctttattattgctatagggaaggctgtttcaggtcttttcacatgaagattcctctaagccaaatgccccctccctaatacacttgttgcctctgaaaataactatttaaaaatatggttgctaatttcatttcaatcttccttgcacccaagtggcaatattatttataacatactctgggatattagcaggctataatattcattcgattgacttaattctccatctccttctgtaaagaagtgatttcactttcgatacagtcgataattaatgttatctctctcttaattgttctttccaaaaaggattatctatcattctttatgaataacatcattacattgatctttttttcgagagtacaattcctttatataattgaactgtaatcaagtaataaatcgaataaattactacaaaaataacaagtggtaaccaaatacgagagtacggattgattaaaataggactaaacatgttcataccaaataatatatgagtaatcccgacaattgctgggaataaaaatatgaagtataactctttatagattgagtttgttaataattctcggcggacaacaattttacgaaacgtttgataacgtgccacatcttttgatgctcccgacagaactttaaacattaagcaacttgccatcgttgctaaaaatgcaactccaacgaagaaccccataaacattagtccgctagcaaaatcatgactcacaatattgtgacgaaaaaccgggaaaataataataactagttactattattatttatttgtcacttttaaagcatctaacactatcttggttgcttctgcaataagcttatcatcgtgtttagcatcctctttatcatgattagaaagtatcgcaagaacaattggttttttatttggtggccaaataattgcgatatcatttctggttccataagatcccgagccagtcttatcagctacttcccatcctcctggaactccggcacgaattaagttgtctccggtagtattccttttcatccaatctattaataaatcccgtttctcagttgaaagtacatctcctagcgtaaaagcctgaagactagtagctaatgcctttggggtactagtatcacgtacgtctcctggaggcacttcgtttaattctggttcaaaacgttcaggatttgtaacggtgtctcctacttctcttagtgattttttgaattcactaggtccacctaattgtttaagaataagattttgtgcagtattatcactatatcgaagagaagcatctgcaagctctttcagggtcataccactatcaacatacttttctgtaattggattgtaattaacaagatcttcacgggtatacaaaactctttgatttagatcttctattgatttcttttgtaaaagtactcccacagctaaagctttgtgggtagatgcgtatgcaaaccgttcatctgattgataagtaacggtttgattcgtatcagtgtccaatgcataaataccgagtttagcatcaaattctttttcaagtttaacaaaagaatcattaccagtaatttcttgtttgatttgatttgtttgtttcgtttgtttaggtaattcagattgagtattaccatcagaacagcctataagcgttgcacatgaaagaaatactacaggtaccatctttttgtaatgtaaaatgttaaaaaacttgtttaagactatcatacattttcaacctctttcaagaatatatgttttttagatgttatacatatcgatacaattaaagagtgtatcggatatcactctcttgcatctcacttttcataaaatgagtgaactatcatgaacccctgttttatacgtatacttaatagacaacctaaataacaagtttgttccatttttatcagtagtcgtatctagaaatctaaaaaagtccatttagaaaatctaaatggactttttcactcatataatcctatctatagttaaacgaataagattaaataaatttaatttttcttattttatctaataaactgtttaggcatttctttaacgtgcttatcgtcatcacgccaatcataggtttctttctgtgaaacatctaaagtttgatctccaattctaacaatattcttatttacccattcaatatatggatctgtatctggatagttccaatatatatttttctctgaatctgtatcaaggttaactaattcacccctaacagcatccgcacttaatgatcctgcattatgaaaataagtcttgatgagatattttccatctggagatttcactgttcgaattaattccccttttggaacaccttgcaaactaaaaagtttccaatatccaaatccaattataattactaacatagtaagtatagttagtaatacttttcttttcgtttttttaatttcaccttttgtatttataatactcattcaactccattccacagaacgcataccatattataccattaaataaatggtataatatatcaaaaataaaaatcctcccgtaatagcattataaaaagggcatgtgatggtctccctatttataaagtgaaactttaatcaccctcaccaatctggctgcccgttaatgcgggataatcatgaaaattcccctttaagaaaaaaataaaaaatcagacagtatacttgaattgctcttcgcaagagaatatactaataaagcaggctatgacgttccttccttctaacttctttggccaaatagggatgttactttcctgctaaacacataggctatgacaattcttccttctttgtagaaatttcaaattgttttagagttgtcaattccctatgaaaaataattagactataaaacctctttcttctttgggattgcataaactttagtttatcaaccattgatgtagaggttttcttttcttaattaacaaattaccacttaacaactaaatgttatatccctaattttccactaaaaaatagctatgtaccctctgtgcatttttctacaattagtgtgtttatacatataaaaataaaaatctaccactgaaaggaggacagtcagactattcccctcttttataaggcgtgaatagctggcgttctcatgaaaaattctatttacataagaagaagtttgaaagtaattataaaaagagaagaaaataaactaccgaacatttatttagccactgttttaaaaaacttggaaaatttaggatttactttttccgagcctttaatagaagagttgcaaacactttcggttgatgcattcacatcgttttacaaagaattggtaaaacatttaaaagaaatggttggagcacatattcagtttactcctatgtatccaaactttccgcaacaaatgatggatttaagtgacgctgatttatacattaatgccattattcattatgtgacgttgcgcctacctgtatcaaaagtagaagaacgactccctcttttagatagagttgatttgaaagttattgacttaggaagtgaagaagatttcaatcaaatgatttctcaattgattagtgcaaacagctctatttcctcaactgataagacggatgtagaatgggctattacacacactgaagatgtttcctgttttctacctaatgtaattcctcataaggaaaatatgtcttttataattggggttttattaataaacagaaaaatatcagccgatgctgctgcaaagtattttaaaacagcaactgatgttcttcgccttgcagttgctttatctgaaggcgatgtgagtttagcatcctccgtccgattcaagaagtttaaccgagcagaaagacgcttccttttaggattgttagagcaatgcggaaacattaccgaagatatgcttcgatacaaaaaacgttggattcgtttaggtgaaattcttcatccagcagaatatcatactcgtttcccaaaaacccaccgagcatttgagattcttcgcaacaacattaaagttgaaacatttaatggaaaaatagaagcagctttgttgaatcgtgatatcatgacagcaaaaaatcttttaaaaactcgcccgggggaatttgccagacgcttggatcatttaatccgtttatgtagtgataagtcaacagatgttttcaatattctcgaagattttctaagtataataggaaacgtttctactcctgtattacttcaactcacagctcattttaagcatcgaaatgataaaaatgaatttcgtaccttttttccaaagggaaatgtagcaaaagctataggtatcgaaaatacacttccatttatctcagaggatatttgtttaatgattgtaaaaatgtgtgaagatactttaaaaaatcgcttcgcagaacttccaagtctcggaaaagtatttttggatgaacagttaaaaaatcacttagttcccttctctcaacgttcagccagcaaagcgcttcgcacattatctcgaggaagtaaagtagatttgccagaaggagatacgattcgttttttcctatggtggaaagaaggctatgtgaatggacaacatacaggacgtgttgacattgatttatctgctgcaatgtacgacgaagattggcaatacaaagaacatgtatccttcacgaacttacgttcaaaaaatttcaaagcctaccatagcggagatattacttctgcaccaaagggggcatctgaattcattgatttcgatattccgtctgtgctgaaatatggtgcacgctatgtagtaatgactttgctttcttacacagaccaaccgtataaagatttaccagaatgctttactggttggatggttcgtcaatatcctggttcaggtgaaatatttgaaccttctactgttcaagataaagtggatattactgccgacacccaaatctctattccagttattttagacttaaaggaacgaaaattgatttggacagatttgtctcttacgagagatctaacttatgataataccatcgaggctaatcaaaaaggtatgatactagttgggaaggctttaactaatttagttaaaccgaatttatatgacttgttccgattacatattgaagctagaggtgaactcgttcaagacatcgaagaagcagaaagcattttttctttggataaagggattactcctttcgatattgaaaaaataatatctgattttatagctgactcaaaaggctaactacattacaaacattgataatgcgtggaaaatatcgatgtataatgtctatgtgaaacaggacctgatagatgcatatcaggtcctgttttttatttagtagatactaaatagtccggttaatcactattcatctaaatacacgatactaataaagtgaaatttattcgaaagaagtttattagttaatatgtatctaattaagaaacagtcatataccagcccaaacatcttttccatatcgcccttcatcttgcacacgatccaaccaatttcttgcttcttgttcactgacttcatgaatttcttgatacgcttgacaaagggtatcttctacatccggagccattttacttccatcaccacatatataaagatgagctccattatctaataacgaaattaaattgattctatcttgttttattaaatgctgtacatatgtttttggatgtccctctagacgagaaaaagctgtgtgtaaagagattaatccatctctttcatcattttctagttctgtacgataaagataatctttttcaggatgacgacaaccaaaatatagatgtgcttctcctaagttaatacctttttgcttttgaacacgacgcgcttgcaagaatccacggaatggtgcaattccagtacctggcccaaccataataattggtgtttctggatctttaggtaattcaaagtttgattgtggcgttcgaatgaaacagataatctcatctttattatgacgctgagctaagtaattagaagcgactccttcatatgtcccttccccactccatgcaggcgcattaacaacaccgaccgtaatgctcagacgattctgtacaacgagtggagagcttgaaatagaatagtaacgcggtttgagcgcaggaagaagttctaaaaagcgttcaaatcggatttcacaagcctcatacttttcaagaaggtccaacattgaaatccgtttctttagtatttgttcatggtaaactccttcttctaataatgcttccaattcttttttatgaggaggacatgctgtgaatgttaccatttctcgtatttgtgctcgagtggctgcttcttgaacttcaacactataactaagaaggtccaataaactaacaggactgtctaaaggtatgtgatttatacttcgtccacttgcactcagtataacttgatccttcccatttaatccaaagcgtcttaaaattcggttgatatttttctcgctattaactggcagcactccaaggtggtctccttctttatatgtagcgccttccggcaaggatacctcgatatgtcgtgtacttctatcactgctggatgattggagttcacgattttctagtatagacgcataaactgcttcatatgttcgtgcaagaggagatcctccaagacgactgacaaattgcagactcaaagtactgcgctctttttccatatttttgttgagctccaatccaaatgccttcatcgcatcagaccacatgctttgtttccattgctcgagctgttcctcaaaatcaccacttgcatctgcttctccgcgtttagaaaatcttgttgctcctttttgagccatctgctcatcaatgtatcttggaatccgttgataggtactagcccaattatgatctccacaaccaaaaactgcgtattgaaccccttttagctcatctgtttttagttcctccaaccattgcacaaactgccctgcattacttggcggttttccattataagaagaagtcacaataagtaccgctccttcttttggcaaacttccaattcgatcgttaagagctaccacttccgttcgaaccccttctaaactagctgtatctgctaattctcttgcaataccttctgctacccctgtatccgagccatacagaacaagaagtgaaagattatcggccccaataatagaaggtgtcttctgaacgtgctgcttaatttcatcgtttttcagcttgtcctctgtaggtgcaagagcagtaggatggctaatagtttgttttcggggtagaatcctaatcttaaaatcaccgggctttagcgttaatgtttgttttacatccagctgatagttttgataatcgattaattcaaaatgttgaagaagcattcccattacaagagtggcttcatgaagtgcaaattgcataccgatacatgctctctggccatttccaaatggcttataagcatgatgaggaaccttatccagctcttcaaatcgttcaggttggaattcttccacattgtctccccatgcatctttatccctatgtagctgtggaataagaacagaaatacgatcttctcctttcttaattgggtatttcccgccaatcactgtatcttcttttgcatagagactgaatgctggagcggtaggccatagacgcagtgattcatttaaaatcatccgtatatacttcagtttcataacttgttggtatgttggagtaggatctgtcaaaacacggtctacttcttcataggcttttttcaatttatccggattctttaataaaaagtaaattgcaaaagataacaatccacttgttgtctcatgcccagctattaaaaaagtgataatttggaaacgaatgttttcatcatctaatttttcaccagtttccggatcttgtacatttaacatacgggaaagtaaatcattttcttcctgatctccactacttttacgttcagcaataatattatctactaaagaaaacatagactggatatcatgctgaaattgacgtttcgttctccacataagtttgtcttctatatctaaccgctgtaattggtgcatcgcctcatctagagcacgggtcatgctagtaataaaaggatgaggggtctcacgataaaagctattaaatcggtaattaaaaccacatagaccaattgtatctaacgtaagacgagtcatatcctccggaacatccacgttttcattcggattaagccgtgcccatttttgaacgagttgtacagcaatatcaaccatcatagcatggtaatctttcattgcccgttggctaaatgtaggcatcaaaatattatgagcttttttccagttaggctcgtgagtctcgcttgtaaataatccgtctccagcaaaggcgcgaacttttgctaaagcaccctctatacttttatcgaaccgtgtttcgtcacagacttctgctaccagttcatgtccggaaacgacaataatggtatcacttaaagtttgaatttgaaaaatgggaccatactcttccgctatcttgataaaggatagggtcggtttatctttatcgattaatgggagattacccagcggtccatatgttttcggctgaggaatggcagatacttttttttccatttaaaacaccctttcaaaaaagcatgaaataacatatcccatttaataaagaggaaatagcaactaatcgcctgggataaagatatgtaattgattaccttattttatcttttccctaactattcatgattatgatattacgtataagcttggcaattagacttataacttgtagaaaaatactaaattaaaatgaagcgaataaatatagttggagccttttaatgttggtgttaaaagataatctaaacttgtaatgtttatgagaaattgcaaacggatctcatctcttgtatttgtttataaaaacgattattttgattcatttttcttctaaaacaccccaaaaatagagaagttgacgagcttaagattgtagtattcgaaaaatcagtagtttagttaaaccaatacgataagcaagtataccgtgttactaatgaaagaggacctgatatgaacatcaggtcctcttttactatataattatttccctgcttcttttagttcttttccagctttaaataccggcgccttagcagcaaaaaacttgttggaatcattatcaagcgttttatttttctctaccgatttagcttctcgacagcttccgcacttgtatctacacgtttaacgaaaaaaactaatagtagtgcaacaacattcatgccaagcgctacataaaacgaatattgaattccagataataaagccttctgagttactattgccttcgtagtttctgtaaaggttgttggatctatatgagacattaaactttcagcttttgtttttgttacagagttcataatcgtaacaagaatagcagtaccaatcgaaccggacacttgttgagccgtattattaacagctgtaccgtgcgggtttaagcgagttggcaattgattaagaccatttgtcataagtggcatcataaccatcgccatcccaaacatccgcagtgtgtagataagaataatatgtgtgtgactagagtcaatttgcagacttgccaacatataagttgaaacagctgtaatggaaagccccactatgccaagaatccgaggaccatatttatcaaatagtttacctgtaattggtgacataatccccattataaccgcacctggaagcatcatcagtccagagctcagcggagaaatgccacggacgttttgtacataagctggtgttaaaatcatacccgaaaacatggccaccgcgttgacaattgcaattacagacgcaagtgcaaacattgggtacttgtaaacacgtaaatccaataacggctcatccatttttaattgacgaataatgaaagcaattagggcaattgcgcctatgattaaggttgttaagacaactttatttgtccaaccatcggagcttgcagaactgaatccatataacaaaccgccaaaaccgacagaagataatagtaatgagagataatcaagttttgcatttttgttttgtttcatgacattctcagatttccaaatccctaacagtaagctaatgattgctaacggtaaaatcatttcaaaaagcaaacgccagtcataatactctacaatataacctgatagtgtcggcccaattgctggagctgtaatcataactagtccaaaaatccccattgctgttccccttttttctcttggaaagcttactagcataatattcattaacaaaggtcccataactgaagagcctgccgcttgaaccatccgaccagtaagtaataaaccaaagttaggtgctacagccgctaaggcagtaccaagaataaaaatcaccatagatgtaataaataggctcctattcgagaaacgcgttattaaaaatgctgaggccggaattaatataccacttacaagcatataccctgtagaaagccactggatcgttgaataatcttgaatgtttaaatctttcattattgatggcaaggctacatttaaaagggagttatttagaaatgaaacaaatgccccaataaaaaggattacaagcattacatatggtggttttcttttatgtaatgtttcactcatatatttaattgccccttcattataaatttcattgattcgtttaaatcgtttacatatttgcacaagaaaacattacccttacagtattttgccaaactcttcgaatggatattctctttttagcaattccacttgctcaacataccattttaaaatctttttgttgattaaacctttataaaaatgtttgttaacggaatttaaattaggctgaaatacaaaaaagaagcaactgaaaatccccttctaaaataaagtgaaactttacatcaatgggaattttacaggcagcgagaaaaatcaaaaagactacgcacccattcctttaaatacaggcttgtagatctagttatgtaaccatccataaaaaggaatattacataggctaagtctaacattacatttttaaagtgaggagaataagcgtatggaccaatattggtatttgaattcaaagggaaatgggcaacaatatactaaccaaatttcattatattcacagcccgaaataactacatctgaggtaatgaatgatttgaagcttcctgagaattggagttaccgagtctatccagttagttgggattcatcagccaattatacggggttcaatccccaacctcctcccttctcttgggggcagcagccaattaattatgcagagatactaccacaaggtcaccctgctaattggactccattaccaggtcatgcaggttttaattttcaaaaacctcccttcccctgggcgcaaccattcaatcatacagggatgttcgcacaaggtcatctcgcagctttactatcgccgccagctaaggcttttaaattcaataccaataacgggggtattttcggaaactctccaggatggggaggacagataagtcccatgggatgggggaataacggaggttacgggcagctgggaatgattggaaacttacttacagcaggaaaaggtaccatgagtggaataggaatgatcagtagtctaatcgggatggggaagttcttcttttagttaattagaacaggagaatgtggctgtagctttaatcaaccacatttaaggacagtaatctcccacctaacttcctagcatagcattcgcggaaattttaggtggatatgtattattacaagttactgttttactttgagtgctcctttactttcttatcaagtgccttactataagcatctttgttttcctgtgataactcataaattgcttttttccaatgctctccgtctacacctgataaaaattcagtacctttcattgtagcttcttgaatcttctgtttatcttctttaccagcatccttaattaacttcgttgcttttcttgcctctgttaccccttcttgtatggatttgtgaatgtctttgtatgtatcaggtacttttatgtgttccatattgtctaaaattttatctatctcgtttgatgtttttaaaacagcttttgctttttctttgtcctttaaggattctcctaagtttagtaacaattcatccttcttaaattggaactctaccacttgctcacatatgtagtacagatactgttgttcagaaattactgttttcgttattgctttactagtttgctcagtcttatgagtagaatctttatctcctacctcgcatccgactaacagcataaatggaactgctaacgttactagtttctttgctctcattatgtattctccttgtagaaagtattgtaagtaattaacatatcaaactataacatacattacattatggttcacttccattacgcttttaaaatgtaaaataagaatacaccccataagccacaaataagattaatagaatagaaatgccgagtaccgtatatataatccattttaaatttgaattcatatcatcctcccgcctcccagcaattccattatataacaaaaaagcattggatacccaatgctttttacacttaagcaaataaagaagtattcgcatataaagctggtgaaccacctgaatgtacgaataaaatattgtcttccttattaaatttaccttttctaattaaatcgattaatcccgctaccgccttacctgtatacactggatcaagtaaaataccttctgttttcgcaagtaactgaactgcctctaccatttccggcgttggtaacgcatatcctggccctacatattcatcaaagcacgtaacagcgtcgcgcgggataaagtttggaataccaacgtgtgctgaagtttcatctacaagttttgctactttctcttcttgctcagcttttcctctacttacgttaattccgattacaggaatctggctttgcgttccagaaaaaccagtaattaaaccggcatgcataccgccgcttccacttacacaaacaactgaactgaaatcaattccttgctcaaatgattgcgccataatttcttgggcacaagcaacgtatcccatagcacccgtagggtttgatccaccaactggaattacatatggtgtattccctttttcacttacttcttttgctactttatgcatttcttccataagatctgctccgttcggtacaacaattacattttcagcacctaataagtgatataagaaatagttcccgttaaagtctctcttctcttctggctcaagcccttcctctaatacaaggatacatttcattttttcttttaccgcagcagcaagtgtcaggcggcaatgatttgactgaataccaccagctgtaattaacgtatctgcaccattttcctgtgcatctgcaactaaaaattctaattttctcgtcttattgccaccagctgttaaaccaagtaaatcatctcgtttaaaataaatagtcgggccaccaagtgcttcagaaaagttgtttaacttttcaattggtgtatatgattctgtatatttttttctcgggaatttagctaaattcattgtaacgctccttttgtacttctttcacaatatatgtaacgttactattattacacgtaaaaatggtgaagtcacctttctcggttaaaaatgtattagaatttcgttttgataagtaaaaccgtattaatgattttaacttaattacggtacatgaaatttacatcaacgatttttcaaatatatcgttcattccttacaatatatcaacaatttttcaaatgtatctatcgtaacttgcaatatatcaacgattttcttaatatatcgatctatcgacaaaaaacgacagacaggcacctcctttctcatcaacaaaaaaagagcctacacattcaaatgcagactccctccaatcacttatttaccgaaaaacgaagtaactgtgttaatcccggctctaaattcatttcacctttatggcgtacgtatacgactttatccccatcaaatttcggagggtttgctttactatacgtatgccactcattcgttccttctatagaatactccatatattcagttgcaccgacaattatattttcactatcatctgccgttacatttggtgccatctgcgcaatttttgaatcactaattaataacttctttatatccttatcacgtttgtaatcgtaagctgtcacaattacatcgttaccatatgctttcacttgtaacccttgtttaaatgaatagccatctggagcagttttctctcctccatttggccctgctgacatccagcctgtttcaatcccgcccgtatttacaacagtgaaacctttttcatctccgcctttaattttctttttaccagcccagtcaggtaagtttaaatcccaatgcgtatgactcgtgaagaaaacaacctgcggatagtcttttaatatatcgtacaatttatccacgtttaaataatcttgtaaatatggtgattgtcttgatccagatactgtatcaggtaaaacgtgatgagagaaaataaagattggtttatttttatctttttgactatactcttctaaattttgttttaaccaacctaattgctcatcactcatatatacttcatcccacatttttgaatcgtggtatttcatatatttttcagttcctaaaaataaaagtggatagccatctaattcttttttatgatataccttttcttgtccactaaatttcagatagcggttaaataaagtttcctcagttacaccatttggccatgtactttgagagagtttcccatctgctgtccatttaccagcataaaactcatgattcccaacagtagaccatacattttctggatgcttatttttatttaacacacgctttacatcatcatattgtgactgttgtccagtcggcgttatatccccattcataataagcgctctagaaagtggcgttactttattcatatcttttaatacgtgatcaaaatctcctaaatcaccttgaatgtcactaataacattaaaagttgtagctgattttcgaacttgctctttcccttccgcatgtgctgaaaatgtcggtaataatgccgccataactgctaacgaagcaactgtctttttcatacaaattctccccctaataatagaatgtaccaactgacatattctgcttctcttaggtgcttgtccaattcacattatagggggagattgtaaagattaatggaataaaaaattaagtgttttttaagagattttgtcttttctacacactccacaattagcaattcgcgccaatctagctttttagtctttaacattacataaatgtaaatgaatatgatgaatctcttagtttaatatgttgtctttttaatctctgttatataaccgccacaaaatatgctatcttttcaagttttctttctttaataaacgttactcctcttttaattagccttaaaattgtaaagtggcttaataatatgtttaatatcaattgtttcttttgtattctcaataatttcatccattggcttatataccattggtgcttcatctaaagtactttctgcaacagatgtagtccaaacctctgtcattgtattttgaaaatcctctaagttaagtacttctttcgccttcttgcgactcataatacgccctgctccatgagggccagaaaagttccaatctggatttcctttaccaaatgcaatgattgaaccatctctcatattgattggaatgattactcgttcatttttctgagctgaaatagcaccttttcgtagaatcatattttccatatcgatgtagttatgaattgtagtgaattgatcggttactttccaatccattttagtgacgatttcatcaatcattgccttacgatttaactctgcatatttttgtgcaattttcatatcattcatgtaatctttaaatccttgtccttctaaataagctaattctttgcgaatcaccggtttcttaatttcacgtaaagcttcatgtatttcttgttgtctaccttctttcgttaaacgctcaatcagttcttctttaatagatttaacgtttataagttgctcgtaagcaaagttttgataatactctgctacttgtttccctaaattacgcgaaccactatgaatgacaatgtatacatttcctttatcatcctcattcagttcgacaaaatgattgcccccgccaagtgtaccaatacttttttgagcacgttgcaatgtaaacggggctcttacactatcaaaatcaatcatttttgaaaatctatgttccttatctcgaatacgaaaaccacttgggacaaatttacgtatcgtttcgtctaagtgatcgaagttgatttcctcttttttcttattaatcataacaacttccatgccacaaccaatatcgtacttacctctcagtttcctgaaagagtggactataccttctctacagtcatcgagatatgcagtctctactgtaggctcaccgtattaattattcctcttcaattcaaaatagatgaggaataattctgtaccttagtctgctaacatggtacaagtctctgaaccattcgattatgtcaccataaccactggctgctgattgccctcgccttttatcgttagggttcccagtcaattgagtgagtagtttaaagtctgagccgattagttaaccccgactaaattaggaacaatcttatcttgaattgtcattgttgtcccaatcgtgcaacctgcacccgcatgtgtatctggcataatacgaatcttgctatcctttacgaattcttggttacaaagatcaataatttgacctgctgcagttttttctacattcgtagtaaacacttttgcttcattgtatttcccttgtaatttcaacatcttctatttcccctttcctttagtttctacaaaacattaatttatatatatttataattatattttccaccactacagctcatttccttttttataaaaaaagacacagagattcctccccatgcctactaatttcctaccttttcaccgcatgcacataatgcactgtctcaaaagctttcaaataatcgtttcgtccttcaaaatataatttatttatgtcttctggcgataaatgttcataaatgagtaagcccgccttctctaacagtgcttccatttcggcataagaaaaacatgatttcatcggttctccgcctaccgcagccatttttaccatattttcaactcgattggacagtcccttttccgtaaacaagttttcatcgggataatcgaaaacgatagaacttcctgccggaaccacctcaaataaacattctattaaactagaaagttcctctttcgttaaatagtacgttacacctaatagactaaagaacgtctttttattttcaaatccttcattccgtaactgctcatagaaaaatcctttcgtgaaatccatcgaaacaaaatgaaggttatttggaacttcaagttctacttcttttattctttccttcttaaacgcctgcgtagaaggatgatccacttcaaatatttctattttattctctaactctcggtttctaaaactgaacgtatctaagcctgcaccgagtatgacgtattgtttcgctcctaatgtaatttcatgtagtaatactctttcacaatatgcggcacgtgctaaaggtgttggtgataactgaacttgtgtaatccattttaatatttcttttggattgtcttgaaaccgctctgcaatgtctgtattgaaaaagtgaatcccttgaaccatgttcgtttcaatattgttacgttcttttggcgatatgaattctttagcgatataatcatcaaagaccttcggattatcaaattcactatgatatgccctgctgaaagctgatactaacgacgttacacttgcttcaccttgtttcacgtacatacactctccttcatttttacaacaaaaatagggttcccctggccaggagaaccctattatacactttatttttatattggtaaattatagcataaataagtttttttgtcaagttttcagcctactaacgctcaacaatttgtgtaatctctagcaggaagatttcgatctacaccgaatattccagttcataacaatacaaatggagggcgtcataaaaagattagtcatcattacagttggaaaaacacacagtggaaaaactacatttgcaagagcattagaaaaagagttaccccactctttcgttatggatcaagataaacaagctgaatttattaacacgcatgatgaaaaattacagccggctgaaggtgctaatacatttaagcacggtctttctaaattcattgttgattatgcgaaagaacatacaaatttacaccttattattagtaactccaatcgcagtaaaaatggaaggttatatttactaaacgaattatttccacagaatgaatatgtacgcatactcgttcattttgacattccagatgatgtactttacgaaagagtggctcgaagcacgcgaagtaccaatatttttagaggtggatattctagtttcaaagaagtatttgatcaacaacaaactgaatcacttcacgatgatgtggtagatcctatagaaaatgaggctgattatttgtttgttattcgcaataataaagatataagctttactattgaagaaattgttcatctagctaaagatttatcccctactccaaaataagagattataaaaattacataatcatagattattatgcaaatacttcctctaggcagcgcagatggtatataatgatggaagaatctacttctatatgctcaattttacacaaaacagctcatgcatatgaaagaaaagaggtacaaaaatatgaaaacaaaacaaacaatcgctgcgtctacactagctttagcaatgattgctggcgcgaactctgctcatgcggaagtaaatgatactactccccagcaaagtacaggagatcgattagctgaaattaagcaacataaacaagagttagatgcgaaattacagcaacaaaaagaaaacgtggatcaaacattaaacgaacttaacaaagttaaggaaaatgttgatacgaaggtgaatgaactacatgaacgtaaacaagttgctgatgaaaaaattaacgaagttaaacagcataaacaagaactagatgcaaaactgcagcaagacaaacaaattgccgaagataaaatcgctgaaattaaagagcataaaaaacaagtagaagataaagttgctgaagtaaaagaacataagcaaaatatcgataacaaagtgaatgagattaaagaacataaacaaactgtcgatgaaaaagtgaatgaaatgaagcaacataaagagaacattgatcaaaaggttaatgaacttaaggaagttaaaaaacaagtagatgaaaaattagctgagttaaaaaaagcgaaacaaactgctgaggacaaactcgctgaactaaaagaaaacaagccgaataccggtaacacgttagaggaacttaagaaaattaaaggcaatttagacagtctttccgctaacttagaattagctaaacaagatgtaaaaaacaaactagctgttttacaagaagctagacaagatttaattaataaaattaacgaaattaaacaatcgaaacaaactgtttcagatgatttatcaaagaaaaaacaagacttagatattaaaatcaacgactttaagcatactgagaaaaaaattgacgacaaattagctgagttacatacaacgaagcaaaatgttgacaacaagattaatgaagtatcacagtctaaacaaacgcaagcagataatggtactaaaaacaataacgctaaagaacttcctaacgctggtagcgagcaatcaaacaatatggctctaggaatgctatctgtattaggcggtgttttattacttactcgtaataaaattaaaacgttattctctaaataagtccataaaaaaaggaaaaccgcacatacatgtacggttttcctttttttatattaactgtccatctcgaagcgtcaatatacgatcacatacatcaagcattctttcatcatgtgtaatcataattgctgctttttggctctctttcacttcgcgtttcatcatttcaacaacttcacgtgcgcgttttgagtctaagcttgccgttggctcatccgctaatattaaatctgggttgttcatgaacgcacgagcgattgctaccctttgtttttccccgccagatagttgatttggataatgattctttctttctcctaatccaaatgccgctaataaatgatctgcacgctttccggattcttgtttactttctttttttagctttgcaatgtaaagtaactgttctttcacatttaaatatggaacaaggtttgcaaactggaaaatgaagccgatttttttcaaacgaatgtctgtcatttccttttctgatagcttcgtaatattttgctcgcgaatgtaaatatccccttttgacggtgataataaagcaccagcaattgataataacgtacttttccctgatccagaaggaccaacgattccgataaactctccagctttcacatcaagcgacatcggatgaagggctgttacttccgtatttccttctccgtacactttacttactttgtctaattttaataatgaagtcattacatcccgcctccaattgcttctaatgcatcaacttttaatacttgatataacgaaataagtgttcctaaaatactaataacgataaagattgccgcatattgtgcaatcatcggtgttgttaataagaatggcataccagctggtaaaatttgttctaacccttgtacaagaacaatacttattaccatcgcaacgactgataagaataacgcctgtacgactaagctatttgctaaataagagttcttcgtaccaattgcttttaatacgcctaattgctgtgttttttgcagtgtaataacgtagaagaatacaccgattaataacgcagcgataacaagtaagaatgcaatgatcatcgtcaatgttccttgctcttctttaaatcctggaatactttgcagtacttcttttttgtcgataacatgtgcatttttgatttctttatctgtattcagcgcaattgcactataatctttttgatttggttgtgaaatagatccccatacgtcttcatttacatacacaactggtgtatggctaaacatttgatctttcgtaaatccaacgattgtaaattctttctttgaaacaggatcaataattgtatctccaatatcaattcctttttctttaattgattcgtcagcaaccatttcgttatttgctgtacctaatttctcaccttttacaatttttggttctaaaaatgaatcacgttcacttgagaaaatagcgatatcaacctttttcgaactatctttcttttcatatgttgaaactttcacacgaaacggaacggcttctttctcgcctacttgatttactacgttatctacatcgtctttcttaatttgtgaacgaagtaatttattttccgcatcatctgctaaaacgaacttatttgcctccatattttgaatcgatgaagcattatcatatgatagtccatttgctaatcctgaaataacaagaactaaaaatgataataacaccataatcagtccgattaatccgtatcttaattttgattgtttcaattcacgcagagctaaaaacatttcgctcgctccttcctctttctttctatgcacttatcataaaaaagaaatatgaacggaatatgaacagaagattacagaggggaaattaaattacatctgatactttttgagcgcgggaaaggtgtggctttatagcagaaatacagtacgtgaaatttatatcagcgatttttcaaatatatcagcgcaaatagaattatatcggcgcagctcaaattatatcagcgattttccgattatatcgacttgccgacataaaacgacaaaaaagaggcagttccgaaacagcctctttctttccatctatttcggaagctccacccgaacggtcgttccttcccccttcgtactatacaccgaaacgtttccatgatgcagttcaacaatcttctgcacaatcgacaatcctaaaccgctaccttctacgtttctcgtccttgctgtatctactttgtaaaaacggtcaaaaatacgatccatttcttctttttccataccgattccgttgtctgatatagaaataatgacactagactctaactcttcgacgaaaaactcaatcgttccaccatcgtttgaaaacttaatgctattcgtgaaaatgttactccaaacttgatgaagtaagttttcatcaccttttatagtgatatctggcacattaaattcaacggcgatatctttttcccgccatttccactcaagcataaaaatgacgtctttaatttgcttctgcagattgaattctcttatttgtagaaccttttcctctttatctaatgaagcgagcgtaagtaactgtttacataaactagacattcgcttactttcaccctcaataatttgtaagtaatgatttctttcttcctcactcatcttttctgtttgcaacgtctttgaaaaaccttgtatggaagaaagtggcgactgaaattcatgtgaaacgttcgaaacgaattcttgtctcatttcatctagttctttaatactcttcgtcatcttttggaagcttgtagataacgttcctatttcatcttttcgttttacatctaattcaatttcatattccccactcgcaattttttgcgtagccttcgtaaatttacggattgggcgaacgatgtaacctgctgcaatcgctataaaaataatacttaatagtacgataaaccctaataataccgctagaaaaattctcatctcgccgaattgttgttgaacgtcagggcgaatgaataaagcgtactgtttatcaccgtgttgtactgggacaccgacgctattaattaattcattatcgaaaaaacctgtaataaagaggcgcgttggataagtagaaacaccattaaatgtctccccctgcaatactttatgaacggtatcatcacttattgtcgtcttacgaaacgcattaccgatacgctttccattcttttgatcatcaacaatgtaaatctcataccctaattttgcaatagaatgcaaatacgtctcttgattttcttcactttgcttttcatataacgatttaacttcttccgcatactttaaaatcttttcactgttatatggttttaacttcacttgataatatacgttcgttaataaaaagccgataatactactaagtagcataatgccgaccgtcataaatacaaatctagaatatagtgatttcatcttatttcaactccaacttatacccgaggccgcgcactgttgtaatttgaaaatcatccgttcgttttgagaaacgatctcgcagccttttcacatgaacatcaactgttcgttcatctccttcaaaatccattccccatactaattcaattagctcttctcttgaaaatgttcttccaggataactagcaagttgtgataataactcaaattcctttaaaggaagcaaaattgtttgaccgttacactttacttctacaccttttcgatcaattgtcgttccgtgcaacgtaataatatctgcactcagcatttgataacgtcgtaataaagctttcatacggaaaatcacttcagctggttcaaatggttttacgatataatcgtccgtaccagaaatgaatcctttttctttatcaactaactgatctttcgccgttaataaaataaccggtatatcatgatacttccggatttcttcacataacgtatagccatcaacgaacggcatcataatgtctacgatcgcaagatgaatattttccttctctaaaacatcttgcgctacctttccatcttctgcttcaaaaactttaaacccctctttttgtaaatgataatgcaacaactctctaatatgcttatcatcatcagctaataaaatatgtatcatcttcattaaaccctctctcgttcatccttctacatcactacattaagaaacaattggattttttgcaagaaaaagaaaaagaatctattttgaaaaaagattattcaaaatagattcttacgttttagtattaagattattttaatcaaaaacaatttctaagccttcgaaatatcaacaaatccttctccgaacacatcacgaacatcgtgtatagcgatgaacgccgccggatccgtagtttgaacaatccgctttagcttcactacttcttgcttattaataacaacataaagaatttccttcggcgttttcgtgtaatagccatgacctgaatacacggtaacccctctccccattaaggttgtcaccttcccggcaatttcatctggattatcagaaataatcgtaatagccttcttcggatttaacccttcaattacaaattccatcactttcgttgctacatatagcataataattgttatcatcagtttttctgcaccaatgatgaaataagatgaaaatgcaacgattaaatcgaagaacagtagaccgtagctaatgctccagcctaaatatttatgtgtcatccttgctaagatcgtagtacctgcagttgttccgccaacgcgaatgataagaccaataccacacccgataaatattcctccgaaaatggcatttacaagcatttcatccgaagcaatcgtccagccttctgttaaatgaagaaatagcgagttagtcactacagcgataatcgtataaattgttgtgattttatttaaaaatttataaccgactattaacaaaatcgcatttaaaattaagttaactaaacctggtgaccattcaaataaatagtacgtaataatcgtgatacctgttaccccaccctcaccaaactcgttcgggataacaaataaattgacacctaaagcaaaaagaaatgcaccaataataataaaaataatgtctgtcgttctttttttcatacagtacctcacttcttatgtaaatatttattctgtcataaactctcaccattatatcgtggaatattcaaatcgaacagtggtttgttttttattttaatataggatgataaatcaactttatcctatatccacttgtaattaagaaagtaaaataactgtatttattatgtactacaactaaagttttgatttcacatgcaattcatgctaaaaatgaataggaacacgtactcgcattaacttcgagtacaaaacaaataggcgaagctatagaataggcttcgcatcaaacgtgtgctcacagagatttatattcataaatctctgattttttcacttatctttctccatatactctttaatttttcgttcttcccattcttttccgaatatcccaaatggaaaagttgttaaaccatgtataacgataccaatcccccaacctccaagtggatataaaaaccataatttacttgaatcagagcttatatttatgaaaaaaagcattaagttaactaatatatagaccgttaaatgaatgtaaaacgcttttaaattctccactctttttttagctcgtaaataattctcatctcgctccatatataaacccctctttcattattgtattttttaactcgcaccgatttaaacatcatattctagtcggatatcccttattctcaataaaatacaaagcaaaaaagtatccagcaaatggtcatacacatcaccatttgctggatactacatgatacatttgttatttacaggattttaattaagaccaaatccatacaccatcattattttcagcgttcgtctttgcttcatgaactttttcaatatggtcaactgtgttccagttaatagaacttccgccccaccctacatacttcatatcaattttcactttctcacccgcattaaatacttgtccctttgttaagaaaacatcaataatagctttcttcccatttaacgatggatactcaactacaacatatttagtagcaccgtctccctcatcttccatcgttcctacttttgatacttctccaattacataattaggtgagccatcttctttcatgtgcatacctaacttgtttgttgtattttcaactgcagttgcaaccatatattctgtaaaattacgcatcatagatccagtagcttttacttcatctcctactttcacatttgaaagtgaatcaatatacacactaaccggttcctcatattgcttagattttacaacaattacaccgttatctacttctactactcgtccttctaacgtcgagaaattcgattcaatagaagctgcactcgcttttgttacttctagtcctggtaaatttgttcctgataatgctgcgatccctaaagcacctgctaaaattaattttttcatacccattatgaaacatctccattcacgatgattttatttttttgattggtatcgaccaacctgtaatcattatagttacaggtagtgaaaataacaaccgttttcctcatgcaatgttgcatactttgattttcaaatataaataggttattcctatattcaacactaagactgaattcttgaatcccagcaggtaaacggattgatgatgaagaaactaatgtcatacatcatgtatttcaatgatacagtttgtataatcgtaatccattacattctgtagcagcggagttaacatgttaataaaaccaaagaggttacaagcaggagacaccgtgacaacagtaagtccttcatggggaggcgcaggtgattctgagataagataacgatatgacagggctcaaataaataaaaacactcctataagatatgactgtgaattagtactttttaaatgatatggagattacttatctaatgataaagggggatttacgtgtatggaagtaacatttacagtaagtaaatgggatgaaaaactaattgatgatactagaaaagatttccctattaatattgcccatgttgaatatgatattgatggagaattaaaaggaaaagcttttgttgaatacttattatattatctagactcaaatataaatgatggtcacttggctacggctaaaatttctggatttttacactttgaaggaatttataaggggcaacaagggacattcacagctatagagcaaggaatatttgataaaggaaatttagattccccaggaacaattattaaagctaccggtaacttagaaaatctgagagggtcctataattatcagtttacaggtcaaactagtaaactgattttagagtttgaattttagcaaaataccttacattttagcagaaaggacatttcttgtaatactcggaatgtcctttttgttgacgagcttattcaaattaaaaatgaacagagtatattatcaatatacagcaatgcatatcattttcgttatggtggaattaaaaacctaagcccgagtgacatggcccccacctattcattacttttcctactaactaaagaataatcccagaaaaactccccttcataacttccttttcaagttgattcctacatataaacatcgcagtaatatttgtacgatttttttcatcgggttcaaattgttctatggttaagtcacaacgaattgtgtcaccactaaacacaggacgtaaaaattcaaaatccatcttgcgagctagtacgttataatcaccgccaatttttgtaggtagtgttgatgttaaaagcccttgtacaacaaatctcccctgctcatctggtgtaacatgatgaacaccttcatctttcgatacttccgtaaataacgcaacatcttcttttgtaaacgttctttcaaaggtaattttttcgcctacttgcaatttcatcgatccccctcctcaaaaacacttgtaaaataagaaaaaccgaaactcaaatcatttcggtttttcaaaactatagaagtcaatatttactttaaagaatgaacaaacaacccactacgcagtttcggttcaaaccacgttgatttcggcggcatgacttctccggcatctgcgattgctaataaatcttccatagatgtcggatataatgcgaatgctgctttgtattcgccgctgttcacaaggcgttctagttcttctagcccccgtattccgccaacaaaatcaatgcgtgaatcagaacgcggatcatgtatttcaagtacttggcttaataaatgatcttgcaggatagatacatctaaacctctaacaagatcattcgcatcaaatgtttcttctttcacagtaagcttataccacttctcatttacatacattccaaatgcttttggttcatttggtttatacggagaaacaggtgcttcttctacatagaagtattgcttgatttgttttaaaaactgttcttctgataaaccgtttaaatctttcacaactcggttatagtcccaaatcgataattcatcatgagggaatagaaccgataagaagaaattaaattcctcttctcctgtgtaatttggatattgttctcttctcataagtcctacttttgcagctgatgcagaacggtgatgcccatctgcaatataaagattaggaatatcttcaaatgcgtttactaaagtcgtaattacatcttcatctgcaatcttccacgcaacatgcttaacaccgtcttctgctgtaaatgtataaattggcgcatgctcttctttccagcttctaattaaatgctttacttcatcttttgtacggtaagttaaaaatatcggacctgtatttgcgtcacacacatctacgtggcgaatacgatctagttctttttcatgacgtgttctttcatgttttttaattgtatcatcttcatactcatcaatagatgtacaaacgacaaggcctgactgcgttcttccttgcatcgtcagttcataaatatatagcgctggctcttcatcttgtatgaacacttcttctcgtataaattgctttaaattgtcgcccgctttttcatacacgcgatcatcatacggtgacaattcaggatctaaatcaatttctgctttatcaacatgcaagaaagaatatggattcccttttacaacttcccttgcctcttcactatttaatacgtcatacggtaaagctgccacttgtgccgctttttcctctactggacgaatggcccgaaacggtcgtatttttgccacattcctctctcctttacacaatcattcgaacggctacaacacctgtaattttgcttatattttctacaatattctcttttattatatcatcaattccgttatcgatatcaatcattgtgtatgcccaagaatgtttactacgattaatcatatcggcaatattaatatgatgttccgctaagcatcctgtaatttgccctaccatattcgggacgttttgatgcataattgtaattcgtttctttccgatatacggcaattctacgtttggataatttactgagttacgaatatttcctgtctctaaatattcacgtaattgacgcgccgccattactgcacaattttcttccgattcagacgttgatgcgccaaggtgaggcgtcgctgttacatttttcatctttattacattttcattcgggaaatccgttacgtaatgtgtaataatatcttcttctaatgctttttgaagaaccttttcatctacaagttctcctctagagaaattaaatagacgcatccctcttttcatcttctctacagcgtgttccccaatgatccccttcgtttgattcgtaagaggaatatgcagtgtaatataatcacacgttgcaaaaatttcatcaaggctaaatgctctttgcacatgtgtagaaagacgccaagctgtttcaactgaaatataaggatcatatccgataacatccatgcctaacgctaacgcatcgttcgcaactaaagcaccgattgcgccaagtccgataacacctagacgtttccctgcaatttctgatccaacaaattgtttttttcctgattcaacaagctgtggtacttcttcaccctctaagtttttcgtccaacttacaccattaataatgttgcgtgaagacataataagactggcaataatgagttcctttactgcattagcatttgcccccggcgtgttaaatactacaattcctttttctgtacatcgctcgacaggaatattatttacaccagcgccagctcttgcaatcgcctttaagtcttttgaaaactcttcttgatgtaaagagtagctacgaagcaaaattccatctggatgattgattctatctcctactacataacgttcttcagtaaaaacttgcaaacctttttctgcaatttgatttaacgtttgaacacgaaacatatccccatctccctatctattctcaagctcaaattccttcatataatctactaatcgttttacgccgtgtgctggcatcgcattgtaaatactggcacgcataccgccaactgagcgatgtccttttaacgtaacaaggccgcgttccttcgctttttgtaaaaactcattgttaagttcttctgacggtgttgtaaatggaatgttcataagtgatcgatacgcaggatcaactggtgaagtaaacaatttagattcatctaaaaaatgataaataagtgaagatttcattctattttgttcttcaatcgcagatactccgccttgctctttcaaccactctagtacaagttttgttacgtaaatactaaaggatggcggtgtattatataaggagttatttttactgtaagtttcataatttaacattgtcggacaagagcgatctgctcccccaattaaatctctttttataatagcaatcgttaagcccgctggtcctaaatttttttgtgctcccgcgtatataagaccaaacttcgaaacatcatattgttctgacaaaatatttgaagacatatccgcaacgagcggcactctttctatatgtggaatatccacatattttgtcccctcaattgtattattcgttgtaatatgtacataatctagtttttcatcgcttagtaaaccgtccagtttaggaatcgtagtaaacttctcttgctcggaagaagcaatcacttgtacttccccaactttttcggcttcttgcagtgcctttttagaccatgagccagttagtacgtatccagcttttttatacgtattcattaagttcagtggtatcatagaaaattgtaatgacgcaccgccttgtaaaaataaaacatcatactcatcaggaatgctcattaattcacgaagtaagttactcgcttcctctataatactttgaaaataagaagatcgatgactcatttccataatagacatgcctgtcccgttataatttaaaagctccttttgcactttctctaaaactggcaaagggagtattgatggccctgctgaaaaattatagactctctccattaccctcataacctccctatttcttatttggatatttttaaactttctgaattataacctaaaatataatatacggtcaatttgttttctattattatggcgcaagacgcgatggaatcgcttgcaagtgcagacttttttatggacatataaaaaagtgttaagtacataatcgtacttaacactctaataatgaaagaataatagctagtcgttcgtaaagaaccgatcaaaaatttgataaatagcagaaagaccaatgagccaataaatagtgtccacaagcgccggcatagaaccaaaccatttctcaactacattgtaatctaacgctaccaataaccaattcaaaccgccaagaatcaccaaaattactgtaaggtaagacaaaaatttcattatgattgccccctaggtgataagatggtgaaaggcctttcactaaaaatatatgtagtaaactttaaaacttacctattttataaaaattattttcggtaccacccgttaataactgtctctgcttctttactatgtatttgatacgcatgtgtactatcattagagccaataaaccaaattgaaaaacctttaaaatatggtttcggttctaatacatctcggtaagcacgccatccatttaattgtacatctttcgaaaacacatttgaaacatctggattccatggattttgtaatccaagttcacgtgctggaacgttaaatccaccgaagtaaactggctttcctgttgcattatgtaattgttccaattgctgaacaacattttgcccacgattatatactgttgtcgcaaataaactttgcttcacttcttcatatgttggatttctttttcctgaaacttcaaaccaactgtctatgctaacaatatccatcttttttaaatacgggcgattgattttctctttaaacttcgcttcataagaaggatcccagcttgctgttaaccaccagttcatttgatacaaaacatttcctttatactgattacgaacaaaatcaattgtatcgctccagtatccttctgcatactccatattcacgaaattagaagcaatctttagtccatacacattgtatttacttgtaatggaattaaaaatatcttgcagaataaccgtcttccaattccagaagaaatcattaatgttacttgggttccattctgtctctccaacattcccctgctgaatatatgggaacggttccactataacttgaatattacgctttaataattcttgaattaaaataatagcttgttgcttttgcgcttgattaattaccatgttagtagaagtcacatttgggatatctacttgaatcggtacatttactgtatttaaatttaagcgctccacatccgctaatactttcgctacatttccaacttcccatactgttacgtttcctgatttgatttttccagattgaacagtatttacatctgcctgtacatttccttgaaaacaaaaagaaaacaacataataaacactcctaaaaaacttattaaactcttatttttcttcacaactttccccctataatttttgcctttcttgattattttatacaacgtttcacatttattccagaaaaaaatgaagtgccgttcaactatattcatataaatcttctaaaaatagtaggaaaaataaaaaaggagcagatttccgctcctttttatccttttacgattgaaattattgaatcccttctggtaacttaattgaatcaaacttttcatatgaatcaatctttatactcacaactgcatccaatttttccttatctgtactagcttttttatctgagttactttcactcacttttatagttgttcgcatctcttcaaatttataatcttttgttattatatattcaatgttaaacgcatccatattaaatccttccgttaattttttcatatctccattaattttttgtaacgtatctaccgcttcttttccctttaattcaagtgtaagtttatatgtgtctccatctttctttgctttcattttcttagccaaagcttccggtaaatctaactcattaagtaaatttttactgaccattacatcatttacattaaattgattattaggtatcgtaactaactctcctgtatcaggggttttcacttgagcagcgacctttccatctacttcatacgttacaatatctgtaccacttattttcatttcagccctagaattcttcagtttcggctccatttgtattttcattttaatttcttctgattggccgctccccttcattgacataagagatgtcaatgtaagatattcctcttgttttaatccgtcagctgcttttttaaaaatatctttcgctactaactctttttctttttttacagatactgttttaggtccacttgttttttcactgctacaaccagttgttaaacctactattagcgccaaactagatattacaaccattttcttcatactgattctccccatttcccacttaaaaatattttcatcccatgtatagtaaatcaactgaaataaatatatatacaataattatttaacctctaaacgaaaccagttattcaatccgtatactaatgtaactaaagctcctatcacaccaaaaacaacaatatttataccaattgacgaaccaaataaaacagccatcattgacaccatcagtaatagcatagcaatactatttatcttaatttctactacatcgccatcctttactttcttttctttacttccaaaaaagaattgttttactttaatattcgcttcatctaattcaaaaggaagcgtatattcttcgttattctcaagtttcattactacttcgttatctacctttacagcaactcttgctgctcctcccattacccctgttgctcttattactttaatactcatgctaaatctcctctccccctatgacttctccatgtcattcatttttgtaattcttctcttatgaaatccttgaatgtaaaacaaaaaatgtatttgtatgacaccgaaatcttttacgctatacacccatttctcgttaaacaaaatattccaacagaaattataacaagttcctacaaatttttttgtcaaattttgtcgcgtttacaaaaaaagagactcttacatatagtaaaagtcttttctatcattaccgtggctgtaacgttaacattttcccttctattcccgctgtattcagtgtagtcgtatgataaatcatctatttgatcatgataccaatcccttctaaaaggataaaaatcctcttccccctaattcgcttctattatgaaagaaccttttgaaacattgaaaaacccccttcattttcctaccaatgaaggggtttttcttatcgttcgctacgccaactttcattatgcccaagatttgaatctgtcgctacttgcacatcatataacatttcactaaagaagcgtttatctacttcttttggtacaatgcgtctttcatcatcaatctcatcgtattcatatgaaccacgattcactgtacctgctttataaaattgaatgtcaaatacacatacatcttcttcatcttcataaccaatcggtgctccgctaaatgacaattgcactcctaatccggtacgagtatcttctttgtaaaatgtataatatacaccgccatcttgaacagacccacggatccatccaagcttcgtcatcttaccgaataacgaacgaccatttagtaaaataccgccaaatctctcaatagcactctcatcattctcttctactacaaacactggacgctcaatttgtaggaacggctgaacaattcccgcactttctaattgctctttccataattccttctccgccccagacaattctaacggatgaacgaaaccaataacagtgccagatgaaagttcataactcttcccgtcaattgtacagaacacgccaccttctgcataacggaatgccttcagcaacttcccttccttatactcaccccaaatgagtgaaatagaaaattgcttcataattggattatccataaatacagacttccatgcattatgtgaccaataacgctttaatgaaagtgccgtttccaatcgttgtttttgcatggaaagagtatttcggagttccttctttaaagaggctaattcttttttagcctcttcagccttttctacatcatcttttgcattcggctttggaagtgacttcatacgttttccttcttctgtctctaattcaatttttgactctgtagttaaaatggcagtaaaacttcgattcccgaaatcaattattttttcaccatgtatagtaaagccgaggtccggcaccaattgatctgccagctcttcctctgttataccacgtgttttcacagcaagacttagcgcttcttttgttgcattacgtacttgcttatgtttatatttaaatgctattgcatgaatagacataagtgcaagcttagatgaagacaaacctaaagcacgaacggcatccgctgctatctttcctctcatttgaagcacccattcatcaatttgctttataagtatgtcgaccattttgtcgtcactatacattccgtataacgaaagaattccacgtttcttcacatctgcgtcttgagaaatccatatttgatatattgtttgcacatattcttttaagtcctcttcatttaaagctctaccaattacttctgctgtttctttcttctcaataacagcatctaaaatatactgttgtaaataggctaacggaattgcagcatcagcaatttcatcagagtcacgtaaacggatttgtggctcatccccaatcaattgcagaagtgaatttcttgtttgttcagttaaaatacgtgcacatagttcttctatcttttcttcctccgtttgaaataaaaacgagaattttcctgcgaaagattcatttttactttcttgcaaagcttcctgtacaaatttcgtatatttttcaagcttatactctataagtattttcatcacattttcacgaacaattttctttttattatgaagttcaactgctacatctgctgcagcttctacctcttttgaaagcagttcaactacagactcacgcatttttttagatgaatctcctaagcttttaattaaaattggacgcattttaatcatgttatcctttgctaactcttctaaaatatatgctttggccacagcagaatactcatcaaatcgttcaatgatgtacgcttgttcttttacaattacacaaacaagcgcttccttcgccttatttcgctcttcactgtagcatgcagcttcttcaactgcataagcgataagcttttccttacttaatccatacgaaagcagatcttctaatacttgtttcggttctactcctctgacagaacattcgtaaagaagttcgtataaattaacactatcttcatctccaaactgtagtgtaagtacagcttccctcttcgctatatcatctatatcccaaagaagcgcaacctctaacaccggcataccccaatacatacttctatatttcggatttttaaatatttgctccatatcctcaagtgacaacttccctagtaaataatcacgatatgtattccgcactgtagacaatttaatttgcaaagcagcaacaaaaaattcttctcgcattttccctctatttagctcatatcctttttcagctagcgttcgtgcgacgatgagataattcattctacttacatattgcaaagtacattgaataaattcaggattttcctccaacataaagcatagcaattcatattcatacgtcttacaaaaatcctcactattcaaatcatgttgccttagacgatgcgcaaaaaatcgttccttagaaatccaaaactgtgtacaaaaactttgaatttcttcatatgtttctctatttacactaccagtttttttgtagttttgagactgaccgagagtgtgacacatataacgtgttgcatagtttataaaaccccaaacatttttcttcgccaatatttcaatatatcgcctcgcaacattcgaatatttatgaacacaaaataatagccgccaaatatgttccggtaaattcccacctataaatacttcactatcatctttaccttttaaataccgtttaactgcttcaaccttttccttttcccctagcagtttcaatataaattctgtatgttcttctaacctctcattcaataaagaactatatgtacgaaacttttcataatctacatcaaacattacaagaagtaatgttacttgctggttagttggtaaagtatgtaattgtccctctatatagttcggattctctcttgttaactctctaagaaaaacatctgcttcattcacataacttgaaatactggataaatatttacatgcgattgctacaagtttgtccaaaggaagtgcacttttttctaaataaatcttcattttagaaaaactgacatgcgcaaaacggactacaagaacatttaataattgctcctcgagtatatggtaaaataatcgaaaaaaatccggatcttgtttatgcactttcctaaaatcgtttataaatcgctccgcaaaatcgcttcttttttgatcacgaattgtcgttagttgaatatcttttaaaatctcttcttcttttgtctgtaaatatcgttgtgataattgtttctgttcttctgtcatattaatatattgaaacaactcagatgtactagtagtcaaactttgtaccccccgcatctttttatctattataaaaatacccttatttaatggtagtatagcataaacctcacaaaaacgaacatacattctatgttaagttaatgtaaattaaaatacactactcaaaatacatttccttctctctaaacttcccattacgcacttctccccactaaaatcctttaatttttcactacaccaattcctcaaaatccccctcacataagctaacgttttcttattattttcaaacgcaattttaagtacctctaacactttctctccagaaagtctttgtatccaattcttcaattccttcacaatatatggggataaactactaatattttgttcataaaacttataaacttcactatttggaacgtcctcttctatagtttccacctctatctcttccgcttcttctttctcttcaataactacttgtgaactactattatcctcttcttttggcataccaaaatgctgcaataataatggaatcttgtattcttcttcaaggcatttacgtaaaaatatatgtatgaactcattactttttatagtctttaactcacgtaatacgcacttctccacattcgtatttgaaatagggttatagtgtaaccaatttattatgaatacctctttcgtttccgtatcatataaaatctttccatactcaacaaacctgtttagcaacttctcaacagtctccatactataacctgtttcaagctctgccacacgcttcggtaatatgtaaataccacattgctttgttttcgtaccagttaacaaatatatgtaaaaataacgctcctctggcgttaaatctaatatgaattcatcttgccaaaagttcacctgcacattacggtataccgccatatgtttccctccactctttgctagtaaataggaaaattttaatccttcattataaagataggcatacgggaatggttttggcattcgaattacaatttttttactactacaacgccggtttcattttttcgcgcttgttttgttcttgtttttgtttttgtttttgtttttgtttttgttttttcttagtgatttattacttggtaggggcttataaggggcttggaagggcattctacattacaatctatgaaatacaatttgttcttcctactaaataggagctattccaaattattattttggatagctcctttcaaattcttcttattttttacttctaccaatgtcagcttctacataccatttattctgctatttgcggacagtacaactctcatttcaaaattcggtgaataaactgctcgattgcaatgcgagtggccctcactgattaaagtttcattttatttttgcattgaatctaacatcttcacaataaaggcagctgcctgaccacgagttgctgtacctcggggatcaaactcattatttccaataccattaactacctttagactgtataatcgttgaaccgattctttgtatgttattaaatgcttatctgtaaatggtaatgctactaactcacctgtaattcctttatatcgtaatgctttgtcaatcataatagatacttcttcacgagtaattggtgagttaggatcaaaaatcccttcaccacgaccattaataattcctacacttgcacaacgtttaataccgtcatgaagtgatggatgtgcctcattaatatctacaaatgacttatttccctctggtagtttaagagcattcgagattaatttcgcaaactccgctctcgttacatttcgatatggcgcaaatacaccattaccttcgccttgcataatacctagactgtttaatttacgaatatgcccttcaaaccagccacctgtaatatcatcttttggtttttgtacttcttcctttggcttttgtacttcttcctttggtacattgtagttaattttaatccaacttgggtcatagaaaatccattctccattacctactttataccaaccatttttaaccgctaatactttgtaacgatctccgtttgaagctttacgtacaacacgatgttcaatacccgcatcactacgtacattgataccactaccatttaccactagttccatgctaggttcagctggattattttcatttggattaaatgagtcatttttatcttgtaaaggcgtatcaatctgcgcatttatatttgcataccactgaattccttgtacgaaaccagcccaattaccacgtgaaattaaaatgtcaggacattttttcccgctccattgttgatgcttgtaaatatgatctgcaccaattccttctttgttcattaaataacctgcaagtcgttttgcattttctaaagctttattgtaatcaccatcttggttaaccgcgatctcgataccgatagactccctgtttcctgatccatctccatctcctgcatgccaaccattttcgtttgttggtaagtgttgataaatttgtttatcgtctacagtaaaatgccatgaagctgttcggaaagtgccttcagttgcttgcttgtataaatatttcgcatgattttcagcattagcaccagcggctgtatttgcggtctcatgaattgtaatgtaacgtgctttcatcggatttgcaggacgaatatcaggatttcctgctggaacaatccactccacaaatggaactcctgcaagtgttccatatttcttcgtactctgtgcactatattgaatacctcttggctttgcaacaggtttcatttgacgatcagatccatcatttcgaccatctacagattcaaatgccttttcaatgtttgaaatagcttccttttctgctacttgtcccttcttagcattttgcattttgtttaattcttctgtttcatcatgtttatgcttatattcttctaaaagcattttttcattttcagatacttctgcttcgttaatttgtacatgatcaggaacttccaacttgaaattagaataatttaatccgctcgttccgtgttctccttgggcaatattaagttgatcagtttgagatttgtttatctcttctgctgatgctgataaaggtacgctccctaaaatcactagacttgttgatagtgcgattacttgttgtttgattgtcttattcattattataataaatacatacacactcccaccgtgtatgtatctcaacctccctttattgttacattaatttttaaaaatatgaatctactatgtacttccaatacattttcttttttatttatatatttaaattatcatattttatactcattaagaaaatatttatatgtcatccctacagatgaatttcatctaacatactttttataaaattcgtcaacaaacattattttacaactaattacaaataccgtcaaaataatcaatttaaacttagacaaataactggcatacaatttcataataagagatcctatactatcgaaatacatctattacaaattccctttaacgttttcaacaatctcatttatcgtattccgatcaaacttatcactaatttcatatgactcacgatctcctacgaattgcacgcctacgatatcattgcgatccttaccgtattgcacttcaataatagatccacgctctatttgcttccaaatgagacctgcttcatctttattatctaaaataatgcagtcttcaatattttcgtcaatcccaattaacttattatcatccatatatccaatctcgtattgttgccgttctttcgctttgccacttactaatatacctttgctaccatatgagtaatccatatagtcctttttctccgtttgtaccgctttcggcttttgtgcttcagttttttcagcagccccagaacctgtaataagactgattgggataaccactattaatactaatctagtaaatttctttatcatttgtaaccaacctcatatatttaatgcaaaactccatttattactctattaaagaataacatgatactaagtaaacagaacgaaagataacatattatttacatactcgcactttaatgaaggactaggccatttaaacctagtccttcataactttaactttgcttcacatacttaattgtattaaatgacgtctcattaaataatcgcaagttttccccatcataatcttgaactttatatgctattttctttttttgaattgtatcttctacaccgtctataaatgctaacttaaatatgtacattaacgcttgaataaatatgtacattttcaattggattctccatactgacttcttttgaagaaaatttagccataaaaaatgcacctccaattgttagttatgtgtctaacaattggggtgcacttcagtaatggtggtcttttttaaattggtaagattgtactaggttgagcaaaaaaatggaaccgaaaaagttatttctaatgaggatagccttcttatgatgaagtttcattcagtggatctgcaagcaaacataaaagaaggaaaaaattacgattttactttacgtggatatagagtacctatactttcatggtttccaaatttagatggtgccgaaccacaaaattagcactattctttaataaaaaatcctactcattttttaatgagtaggattttttattaaagagctatttcgtattaatttgtgccatcatttaatatgctatttttaaatgatttccaaatttgatgactaattatctaaatttctaaactctatacagcactatcaattaaacaattattaaatatatcttctatctaaaacatcgtattatcattagctgcttcacttggaatctcttgaattacatcccagtgttcgacaatctttccatccttgatacgaaatatatccactatagcaactcccttatcttgagaattagtacgagagtgtacatgaagagcaactgtatccccttcagctactacacgtttaatctctgcagaggaattaggatttttaacaaaatcctccttaaagaaatccatgaaggcttttcgtccatcagcaacaaaaggattatgttgcttataatcttcgctaacatatttagggataatatcgatattatgtttgttaaaaacttcattatagaaatcaactaccatctttttattcttttcattttcttttacttcttttgatacagaagcgacattttcgctctttattgagttccctttgttattaccggtggaagcttgatataccaaagtcgaaactactcctaaaataaatacagaaataattgttatgattaaatttttctctaatttcatatatacctacctcttctacttaaataagttttcttctataaaaagcttgaagaaggagaaaccttccccaaaatgtaatgtcagggataatgttaggaatttcatttatcctaacctccccctatacaaggcatattagaaacgattaactctaacttaatacctcattaacagttgcactgtccacaatttgaataaacttcttaaccttatcgttctcatcaaacttataaaggtgacaaaaatctgctacaaatgacttccctgtagttttatatgttccactatattttccataaacgataacagtattgttattaaaagcataaatttcatctttagcgctatagtcatcccattctgtgccaagacgttcatgtacgtttttcactacttcatctggacctatataagtacctgcatatggaaacccagcagcttctgtccaagatacattttcacttaaatacgttttgaacgcatccaatttcccttcgccagttaacacatacgtttcatgtaatagtttttgatatttattcatatcattaaccccaaggcatttcttttgttacaacttttgcacttaattctaatacacctttatttgcatagcctggatatgctgcttcaagttttgccacaaaatcttttgaagttccactttcctcagaagcttgaaccgccgttcttagataatccattgtcgcagtaagtgcttgattatttagggatttttcgattgatccatggctaggcacaattatgtcagcatgtaatgcttgtaatactttcaagttctcaatccatgcctccatagccgcttttgagctagtatccgctaagaatacatgtatttcgttaaatacatcgataccaccaattaatacttttagttctttattaaataggctagttctgtaatgatctaagcctactagttcaaatgttaacccctgaaaatcaatcgctttttctttaaatacttgaggtaataccacgttacttggtgcattttctccaagggcgtctttccaaacttttaatttccctaagacagaatgaacgatatgttcaacagtagactctgttgcatacgctatagcttctgggtaaacggctttaatgctctctaatccaaagtagtagtctggatccccatgaataataaagattttatctaaagataagttgttttttttcagatactcaacaatttctttcgaatcagattgagtaaattttgagtttattaaaaatgcatgtcctgctttctcaactaatgttgctgtgaccataaagcttttttcgtccgaactaaacaccgttaatttcacatctttttgatttgtatcgattgttttaaacatagtatgttattctccttttgttaaagttattaactaattatcatatttttatcttgttccgataaaatctcccactcccatttatctgaaagtgtaatagtactagcgaatattccggagatcaatgtcaggtggcctaagataacatgtttgctactatatcctaaattttcttaatataaatttttaaaacgcgcttcaattttatccggcgtcattacgccaccaccaataggaataatttgattatccttttgtaaaagtaatgaaggatagctattaacaccaagctgtcgaactttattgaaatcattttggacatctattattgtttcttgagcgtttaaacgttctaacacttgttcagggtccaaaccatgctcgattgcaatcttgcgatatgtttcaggatcactcagactttggccctcataataaaacgctttttgcatagccgaagtgaattctaataaacggtctggcgctaatgagcgtaaagctgaaaagccaattgcagcatctttcgaattcattttaaaagtcccttcctccaccaatttttgatatgaaggaccaaattcagcacctgtaagttgattaattcttttatttccttcttctatatatgagaagtttttcattggtaaattatctaaaaataaccctccacataaaaccgttaatggtaattcagtgtggtttttgtaaaatcctttaatactttctgaaaaaccatagcaccatccacaatatgcatcccatacgtaaataagattatcttgtttcgtctccatttaaatctcctaccttttttattatccagctcaactaaatttttggtttatataagtacatatttttataccttgttcttttttagataccttactatatttccccaaaactaatatttccaaagaaagatccaccaaggtttttaacaaaagataacattgcaccttattgccccgtaacagaaaatactaaagcttggaatatgcattgatttgaatgtgttagtaactttctacaccgggtggcaacgtatggaccaccatccttaattaaatatataaatcatatttttagcagatattagttgtaactaaattaattacatctttatgtaaccattttagttacaactaatgtagaagtcaattctttttttcgaaaacattaaatttctacattataaagaaattctgtgttaacttgtaaaaaaaagaggagccatctcctcttcataaataaacactatttaatttgttccttatactcatggttaacaactacataccactttcctgtatcaaatttttctttattaatcacgtaaactttactttctctcattacctcccctggttttaatcccttagtaatactagaggtctcgcctttttcaaccgcataactactagctgccaacacatcactttggtaagcattatcattttcatccactaaatccactgatggtaaaacggctaatttcatcggttcgtttgtgatatttttcccttctgcttctacaacaataaagacatgtccatcttcaggtttttggaatcctatactctctttaccaaccttatctctttctacaactctttttacagttacatcaaatttaggtgtatgaaaatccttgtttacagcatactctttttcttttatttttgatttctcttttgcttgttctgtatttttctgctttgtattttctttcgttttcgcctcatcggttgtttgcactttcttttcttcttgtttagaattggtttctttagattctgaagaagttttgtcggatgtattgccgcaaccagataaattgaatactaaagcgccacctaaaatacatgtagtaaattttttcaacatctctttttatcccccaataacacgatatgtaaattccttacttatcatagcaaaaaatatgatcttaaattgttgcatcttgtcgaatgattaagaataatcaattgtttttattacatataaaaaacatgatcttgatgtagtaccaagatcatgttttacgttgatgttatttataaaatactttatccacattatactttgcttgaaattcgttaatcatatatgtttcgtaaatttctctttccatcggatcttctacaatacatacatcaatacgatacacttcatcacgatgatttttaatactttgtcttactttacgtgctttcccagcattatagttaaagaataaagggaattatatgataggagatacaaatatagacagtcgctgaccattaatctacaaccaatcccacaccccaacacaaaagaaaaaagcaccaggtcccccctagtgctctccctctaaaacaaatgacaagccacctcatgccccttcgcaatctcaaccatcttcggtacttcctgtgcgcatttttcagtggcgaatttgcagcgcgttctgaatttgcagccggatggtgtgtttagtgggctcggtacttctccctctaggataatccgttctttgccaatgtttgttggatctggttctggcatggatgagagtagtgcttgtgtgtatggatgtgccggttttgtgtataggtcttcactgtcggcaatttctactatgtttcctaagtacatgactccgatgcggtctgatatgtgccttaccatcgataggtcatgtgcgatgaataagtatgtgactccagtttcttcttggatgtcttgcagcatgtttacgacttgtgcttggactgagacatcgagtgctgagattggttcgtcacataggataaagtctggttttacagatagtgcgcgcgcgatgctaatgcgctggcgctggcccccgctaaattcgtgcgggtagcgatataaatgttcttcttttaagcctacctttttgagcaggtctaatatgatttctttttgttcttctttttcgtaagagccgtgaatgttcattggctcgctaataatttggaatacgttcattgctgggtttaatgatgcgtatggatcttggaaaatgatttgcattcgttttcgatattcttttagttcactttcctttaaacttgcgatgtcttttccgtcgaataaaacgttacctgaagtgacatcttgtaaacgaatgatgcttcttcctgtcgttgattttccgcagccagattctcctactaatccgaatgtttcaccctttttaattgtgaaacttaagtcatcgactgcttttaattgctccgtttttctgccgaatagtccttttttaataggaaagtatttttttaagttccgaacttcaattaagttttcttcatgcatgaaaatcacctaccgccctatcgtttagccagcacatggaacgtctttcgtttccgatttcaaaatatggtggacgttctttttcacaaatgtccatcgcatgcgggcaacgctctgcgaatgggcaaccttgtggcgggtttaataagtttggcgttacaccttgaattggcgcgagtctctcttttacgccgttcgatattttcggcagagagtttaataaccctttcgtatatggatgattcggcgattggaaaatatcaagtacaggtccttcttccataataagtccgccatacataacgataacgcgtgtacagttttgtgcgactattcctaagtcatgcgtaataagaagtaacgccatgttcgtttcgttttttaagtttttcattaaatctagtatttgtgcttgtatcgttacatcaagtgctgtcgtcggttcgtccgcaatgagaaggtcagggttacaagacatcgccattgcgatcataactcgctgcttcatacctccgcttagttcatgcggatattgtttcaccctttcttctggtgaagaaagaccgacttgttttaacaagttgaccgcgatttgctctgcttctttctttttcactttttgatgacgtataattacttccatcatttgtttcccaattttcacgaccggatttaacgctgacattgggtcttgagagataagtgaaatttgatttcctctaatagaacgcaattctttttcagatttagaaagtatgttttcattatgaaaaaggatttccccttctttcacttttcctggtgacgtaacgagagacataacggacttcgccattacactctttccgcttccagattccccaacgataccgactacttctcctttatttaagcgaaatgtaacgccgcgaaccgcttcaacttcgccactttctatgaaaaaagaagtctttaaatttttcacttctagtagtttttcagacacgcttctcactcccttcacttaacactttagttttcatgtccggctccttttggtgcgaaagctttcttcaatgcttcaccaattacgttaaaactaagtaccgttaaaaggataaggaatcctgggaagagtgttaaataccaagcttcaccaatatatccttgcgcattgtttagcatgctgccccaagaagaatctggttctctaatacctaaacctaagaaactaagtgatgattccattaaaatcgatgtcgcaattgttaatgtcgcagcgataataatggttgataaaatgttaggaatgatatgtcttacaataatcataagtgatttttgtcctgatacttttgcgtataaaacgtactcacgctcttttacagataacgtttctgcccttacaatacgggcggtgtccatccatgttagtaatccgataataagaactaacgtcgtaattcctggttttaaatacgcatttaatagtagcattaaaaagaatgatggaattgacataagtacttcaacaaccctcattaagaagttgtctaactttccgccaaaatatccgctaattgttccaactgcggtaccgattgtaatagaaacaaccatcgcaagaaaaccgaccgcaagtgaaactcgtccgccatataacgctctcgttaagtaatctcttccgtaatcatccgttccgaaaggatgactcatactcggttcttgtaagcgatctggaatcgacattttgctaggatcgtacggcgatacgaatgcgaaaattgatgcgaccgttaaaatcgcaagtataataactcccattgcaacaaacttatttttcgtaaagctatgttttatcgtttgaaatctcctattattcattccaaatcaccccctcattcgaatgcgcggatctactacgccatataaaatatcagcaattaagttaccgagaattaacatgaatgatgatagtaatgtaattgccatgataatcggataatcaaatctaaaaatagcatttaccccaagtgaaccaagacccggccatgaaaatactgtttccgtaataaatgctccgcctactaaacttggaatcgataatccgaaaattgtaatgatcggtattaatacatttcgaagtacgtgattaaataacaccgttttctttgaagcaccgtacgcatattgaatttgtacatattcttcttctaattgctgaatcgtacttgaacgaatatatctcatataaacagatacgttttggaacgctagcaccatacaaggtaaaatgccgtgttgcacaatatcccaaacagaatctttacctacggtgcgcatacccatactcggaagtaggttcaattttaaagagaataagtagactaatagtagtgcaaaccagaaaaccggcatagaaataccaacatatgaaataaagtttacaatgcggtcaaagaacgaattctttttcacacctgtaaatagtccaagtggtattgcgattacgaatgagacgagtaaagatgatcccattaacccaattgttgcgggtaatctttctgcgataagatctaaaacaggacgatgattttgaagtgaataaccaaagttccctgttaaaatgttttttaaccataaaaaatactgcacgtaaattggttgatctagtcctaaacttttacgaatacgctccacatcaattggactcatatttggcgttacaaagtttcgaacaggatcccccggcgctagctttattaatagaaaagaaataatagaaataacaaataaaagcggaattgcatttaaaagcctcttcgcaattactttatacacaaacttcccccctcaagctaaagaagctgatttccaccagcttctttattgtttcttatttcacttcataaatcttagatagatcttcaaacattgtgacaggaattgctttcgcttcttttaatccatcaaactttttatctactgcaataactgctttcggatacgcaattggtagataaggtacatcttctctagctgtttcttgaattttatggtatagctctgcacgttttgttttatccgtttcaactgcagcttcttcccataacttatcgaaatcagcgtttttatatcgtgcatagttgtattcagcattacttaagaataggcttttatatgaatctggctcaggtcccattatgtaaccaccaaatgtaatgtcatattctttattctctttatctaagcctttttcacttgccgcactagcatctaatgcatttagttcaacttctaagccaacttcttttaatttttgttgtgtataaagcgctaagctttccataattttattattcgttacatacatcacacgtactttttctttatctttcacaccagcttttgctaataaatctttcgcttcttttttatcatacttatagcctttaatatctttcgcataatacatagcgtctggcgttaagattgaatttgctggttctgcaaattcacccgaaacgaatgctgagttaatcatttcttttttatctaacgcatgcgcaattgcttggcgcacttcttttttcttcatcaaatctgtattcatgttataagataagtagaataatctaccttcagggaatgtcaccattgagaagttcccagtactatctagttttttaaagtcttgcggctcaatcattttcatgttgatttgaccattttgcagtgaaacatttgctgtattacggtcttttacaacgcggtatacgatagagtctaatttagctttcccacctacataatcatcaaatcgatctaatgcaacatactcatctgatttatactctttaaacttaaacggccctgatcctacaggctgtaagtttttcttactcttcgctaaatctgcttccccttcaaatacatgtttcggaattgggaagaaatcattcattacaccttcgaaagatgcgcttacttgtggtaaaacgaattgagttgttaactcatctacctttttcacctcaagcggctttcctttaaaaataaagttttcacgacttgagctattttgcttctcatccaaaatagattggaatgtaaatgctatatcgtctgatgtaattttcttaccatcatgccatttcaaattatcttttaatttcaatgtccacgttaattgatcttctgaaggcgtaaagctctcagcaagaacaaactttttcttaccgtcttccatatgatatagcggcgcatataaagcctgctgcacagttaatgacacacgatcattcgcataaagcggattcatcgtatctggattatcgctaacaccaatcgttaaccctcctccatctttcggagtccctgatttactagtgcccgcttgcttcgaagaatctttttccccagaacaagccgctaatgcaataagtagtattagaacaaatggtaatgcaaataatttccgtttcatctttcggccccctcaaactagttatacccataagaaaactcggaattaatcccgagttttcttataagttttaaattaccactacctgtatgtaaagtcaaacttttttgtaaatgtggaaagtttgaaatctactaatacattcttgccataaaatatatttataaggaggattaaaaaagaagaccacgaataggttacctcgtaaaatgagttaaaaaactagtagcttacaaaaaaactctaaaatgattgttatatatgaccgaaaatgtagaatgggattaaagacaaaaaacacatttaggaggttatcatgacatttgatgaactgaaaaaaaacaaaccaacaacccaatggattgagaatgatgaagatggggaatttttcactgaagaaaatataagtgcaacaaataaagttcttgatacttacataaataatttagagaaattgggaaaaaatccaactgaaattgaaataatgcatgttgttaaagaggttgttcttaacataaatgaattaaatgacgaacatgactattttattgaaacaatggaaagagaagatctctatgaatttatcgatacagcagcacgaatagctggcttagaatccgaggaagatataacagaagaatggcgagaatggtaaaaagttgcccctctaataattagaggggcaacttttttcatataccaattgaatgaatgatttgatgtccgcacagaattcatacattgcaacataatattaaaaggattcaattataaatactagcacatccacatcaacaaaaaagaccaccaaaaggcagtccctcaaaactcaatcctattcccaatcccgcactccaccgctttctcatacaaatactttgcaacaataatatctactactgccaaaccaactgatttgaaaatagtaatctcttcattattttcgcgtccagctttttctccacttataatttgaccaagttcagcgtgaatggcgtttgctttgaatagaccttcttttatcggaacttgaaggtctcctgtttcgtctagtgctgcttcttttgattcgactactactttgtttgctcccgcgatggcatgggatggtagttcttgcatgttcggtttgaatgagccgacggcgtttatgtgcacgcctttttgtagtttttctgagaagactggtgtggatgcgttcgtagttgtgacgatgatgtctgcttcgcttattgcttcatttgcatttgtgtgaacatatgcaggtttgttgaatctctcttgtatatattccgcaaatgcatacgccttttcttctgtgcgattgtataagatgactttttcgatatctctaaccgcaaatattgcttcagcaatacctttcgcttgttcacccgtgccgataatgcataaagtttttgcgttatgacgagctaaatattttgtcgctactcctgataaggcgcctgttcgaatcatcgttaagtacgatccttctaaaagtgcgagcggttctcccgtttgaaagtctgatagcatcacaatcccgttgatcgttttctttcctatctgtttattttgcgggactaccgttactacttttaagccaagtgcctcaagcccttccgctactgaaggcataattaatgccgtatttcgctcgttcgcaaatggtaatgagccccttattggtgtaatcgttctttctgcggaaaattcttttaaagcaagcgccgcgtattcaataacttcattcatatttactaagtttctttgttcgttcgcgcttatgactaacatatctttccaccccctccttctatcctaacaaaaatccacggttcaaatcatctctcgggtctacaacgaactgatgaaatcctgtaataaaggcatgccccgttacttttggaacgacagcttcatatgtatctactgcggttaccgacaatacttccccctcgaatttcccgtcagtaatgcattcatggacgaaaatttctcccttttgtaaagcatctttttcaaaaagagttgcgattcttgcggaagttcctgtaccgcaaggagaacgatctacttgcccatcagcaaagattgttacatttcgtaaagttgcgtcttctcctttcggttcatctgagaaaataacgccgtatatcccttttaatccttcttcaagtggatgcttcacttccattttgctctcgatgtagtgcttaattttaccgccccacgcttgaatagcagataagtctttgaaatcgactttcaagccaaattctttacagtctactaccgcataaaaagctccgccaaacgcgatatctacttgaaattcatagttatctattttaataggaacgtcttttttgtatacaaaggaaggaacattttcaaatgatacggactctacttcgctcccgttatatgttgcatacgcaatgacttccccagcagggctatcaataatgaactgttgtttctcacctgtcacttcaaacatgcctgtttcaattccgactgtaataacagcaataatgccatgaccacacatcgtactccatccttcgttgtgcataaataatacgccaaaatcagcgtgagcactcgcaggcggagtaatgatacaaccgtacatgccgtgatgtcctctcggttcatacataagaacttcgcgaagatgatccaaatgttccatgcagtacgcacgtctttctagctgcgtgtctccttttatttccggcacgccgcccgtaataattcgaagcggttccccagctacgtgagcatcaattgttgtgtacactttactaaccttcatttctatctctcccctatatgttgatactctttttattgcaaatatcatgccaacgcataggatataaatttgtatacattgtttaaaaaagcatacattactgtctatttttttatacactgtccagaggctatgttatggagccccttgatacaaccagtcttattattttcactggaaagttacttccacccccaacatatactgttcaaaagcaaaaaggaagtgatccaatgtattacggaacaaagggctggtacgtagctgaactaaaaaaattaggcgtacgctatcatgaaggacgaaaactagaaagttaccgcgggcacatcttgcgcaatttactacttgcacaacaagagaaattaaaagaacagtaacattctaatgtaacgatatcggcgattctcggaatatatcagcgattcaacacaatatatcggcgattcgacatgtaatatcgacttaccgacaaatttcgctaattcatctacctaaaccaccaaccgattacacatcaatacaaacaaaaaaggtcacccaaacgggtgacctttctttcttattcacaaacaagaatctgtctagtaaatgatccttttcttgtaatacagcgatctgtaatttcgaatcctgcttcatggatcatgtcgtccattgtttccatcgtgacaacgactacttttttcgcgatgcggcgtgcacttgagagaattgatagttgatcttctggtgtggcatgcgtaaataagtcgtatggcatatcgataatggcaacgtcgtagttctcagtaatttcctcgatcggcccttttgttactgttccttcaaatccgaaatgtgcgatgttttttctcgttccaagaactacaagtggatttatatctctaccaacgatgttaatccccatagaaagtgcttctactactactgttccaataccgcagcacgggtcaattgctcgtactccctctggatttggtacagcgatatttgcaactgatctcgcaacacgtgtgctaagagatgtcgaataactatgcggtttttttatgtgatgataccaaactggttcgctttctacatagtgcccgaagtaccagcgtcctccaagaggaacaatcccgaatacacgctctggattacgaacatccgcttctccttcaatatgcatgccgaggtctctttcaataagacgtctttctccatattcaattttattctctccaacaaggtcattaattttaacgaagatgactttgaacgtcgctcccgccaaatcaatttgttccacttgttttaaaatgctttctaagtcgtccccttcatacataacttcaattcgctctttaataaacgcacttctactcgggtcaattttgacatcactttttaaaatattaacgtgggactccattccaaagaacgagcgcatttccaagtaacataaagcacgctcctcctcacgaaatgcatacgtatatatacaggcaggtgttttactgtgattattcaatctattatcatcctctatcgtttaaaattgttatgattacaattactcaaatacttttcttttgtatataaaattaaatgatatcatatgccggaaataaagagaaacgttaataaataaaagagactgccaatggcaatctcttattatttattaacggaaagaagacacgttgttacccatttcttcatagtaatctaaaataccttgataaatagcttccgctgcactttgtctctgcgctggtgtagctattttatctgcatcacttttattatctacaaatgctaattctgctaatacagctggcattgtattttctctaattacgtataaatcgccttttttcacaccacgatcttttgttcccagtgcatctacaagacgctcttgaattttttctgctagtaaacgactttctgatacgttaggatttgttcctcttgctgtcgctgattcatagtagaacgtttctgtaccttgtccatttttctcttccgtgccattaccatgaatacttacaaaaatatccccattatttttttgtgcaaattctacacgtttctttaaagaatcagaagcacttgttcctggacgtgtatcatctgtacgagtgaataacacagtaaatggtgtctttttctcaaatattttctgtaatcgtagtgatacatctaatacagtttcactttctttctcataataacctggattacctgaatccgctccaccatgacctggatcaatgataatcgcttttccttctaagaagttaccttgcttcactggatttaattgatttttattaacccattggaaaccagcgcccatgcggatacgaatccagctgcctttctcttcaataacagttacttgttgtgcgttatgtgttcccattacttttgaagaagaagaagcttctgcataagtagtgaatccttcattaataacttctgttttctctactaaaggtgtccatttatcacctttacttgttgcaattttgatccatccatctcgttcttctttaatttcaaccatttgtggattatgctgatttgcactaatcccagaacttaatgatggtgcgtgatatgtaatgaattttctatctatgtacattttctttgtttctactggacgatcactattcttgctaaatttatctgtttgcgcagtaagttgagctgcttgttcacgcgtaatagaatcattcggtttccagccatcctctgtacctaatgaaagttttaattctactaaaatattaacttcttctttaccccaatgattctctaaatcagcaaattttgtaggaactggtcctgttactttgcttttcagattatatgctcttacaagcatagctgccatttcagcacgagttacttttccttcaggatcaaatactcctggttctcgccctttaataatattctctttttccatggctgcaataaatgaagctgcccaactattttttgcatcattataagacggctttgcatttggatctattttagcaccaattgctgttgcgataatctttgctgcctgagcacgtgttaaatttccgtatggcataaagttaccatctggcataccgttaattacatttctctctactaaataataaattgcgtcttttgaccacgcactatctgaaacatcaggaaatttcttcgtttctgctaaactactaattggatgtgctagtaaatttgctgctaataaacctgcggctattgctttgtacttcatgaaaaataaatctcctctcaaaacttcatattcatacaatttttttaatcaagctaactaaaaaatattaactattaattaatccctttcatagtgtataacattatatatctatagtaaatacgtttccggccgtataacaaaaatcgcatatatataacttataatgaatgtatataaaaactttaatcagccctcaccaatcgggcttttacgggcagcccgcccccatctaacttttttgctttcgctgaattttgaggtaggagtcttactgcccggcaaatagcgggataaaaaagcgattaggacatgtctcctaatcgctttgccaaataaaaagctgattaaaaataatatctttaatcagctctctattatctatgaaattattcttcaattaaattagacattacatatgcatacactaatgcttctgtatgcgcaatagaactttcatgcgtacgttcaaatgcgtgggaagaatcaatacccgctccaattaacgcatgtttcacatcaaatcccgcgcgaatcgcagctgatgcatcagatgcgtagtacggataaatatctactttatattcaatatgattcgttttcgcaagctctactaaatgtttgcgcagtgcataatgatacgggccgctagagtcttttgcacaaatagatactgtatattcatcagatgcttgtccatcacctaacgctcccatatcaactgctaagtattcaacagtttcttctggaatgttagagttaccaccgtatccaatctcttcattattagaaattaagaaatgcgtcgtatatggtaatgttatgttttcatcttgtaatcttttaattaattttaataaaattgcaacacttactttgtcatctaaatgacgtgattttatgtatccactctctgtaatttgaacgcgcggatcaaatgaaacgaagtctcctacttcaattcctaattcgcgtacttcatcagctgaaaatacgcgctcatcaatacgaacttcaatatttttctcatcgcgttttgcttcacctgcatctttatatacatgtacagatgtttgatgcattaaaattgttcctgtatacgtcttgccacttgatgtttcaatttcgcaatattccccttctacggagttccagcgaaatccaccaatcatagaaagactcaggcgaccgtcaggcttaatttcttttaccatcgcacctaacgtatcaacgtgtgccgttaataagcggtgctgtgcatcatttttcccttttaccgttaaaataagagctcccttattattacatttcgtttctacgttccactcactgacatagttttcaatgaaattaataatttttgctgtatttccagatggacttggaatagagacaagctccttaatcagttccatcgtttctttcgcatgatgtgccattgtcgtttcctcctctttttctctactattcagtatacaaaattcaccagaaaacctctacttatatagcttaattttctaaattgtagtaaaattctttttagtatataaaaggagttataaaatatgaatatatcaaaaaaatatatacacattgcactcatttggtttttagcatcattattttgtttacaaatctcttatgccattcacactactacttctattacaatcggctggatattaacagctatcttcttcattattagcttcattgcaacaaaaaagcatagcgttactcagtaacgctatgcttttcctataaaactattcttctgaaacgtctaataaataaatccctttttcaaatccaccgcgctctatctctttttgcttacgaaggcgttctacatcttcaatcgatgcaccttctgcacgtgctaatgagatgataacttctagtgcatctgcaagagaatctagcgcatgttcgcgttctttcatagaagcaaattcacgaatttcttccgttccaattttcgctaaagcctgtatgtatgcttgccctgttaatttttgtgctgtatatgtttttccagacattaaaatcttctctggaacacgatctcttactaacttgttatatgctgacatcattcatcctcctatatttaataacatccgagctctgctttatagaaaaaccattttttcttcacgcacgcacttaacatatcaattcctgatccatgtgctcttacatgtggaaagaaatagtgctctaagtcttcgtccttaccatatagagtttgatactcatctggaatcgcttcttttttcacatctttttctttcgtcaccccgtcagaaaatgcaacacttggatgtccctcaaaaaacaacgcagtccgaactgccaaagatggtgtactatgcaaagcagaatatgtaagcaaaataatagtaataacaccgatcattttcttcatgtattactccttaaaaaaagtgctaacacaattatactaaaatgtgttagcactttctcccctttatcccgaattaacgagctaataatcagtgaggaatggacaaaatcctcacttcactttattcccctttaaatactggtaaacgtttctctaaaaacgcagcaattccttctttatgatccgctgtttgtctcattgcatattgaccacgcttttctaattgcaatgtttgctctaaattagagcgatttacttcacataaaatttgcttcgtttgaatcattgctttaatcggtttttgtgaccattcattaattttttgtttcacagccgtttggaaatcttcgccgattacttcatcaattaagccgatatcaagcgcttctgtcgctgataacttcttaccttcccaaataatttgcttcgtcatattttcaccgacacgcttttgaaggaagaaatgaccgcctccatctggaattaaagcgattccaataaagttcattgcaataacagatgatatatccgccattacataatcagctgttaacgcaatacttaacccaagacctgcagtcggtccatgaattgcactaataacaagctttggcatcgtatataatgtcacgacaacttcagaaatggtattcataatgccatcaaacttactttcatcattacttgaaagcatcgatttaatatccccacccgcagaaaaaccacggccgttcccgcataacacaacgatatgcgcagaactttccgctacttctttcaacttttgtaataactcttttaatgtcggctcatctaacgcatttaacacctctgggcgattgaccataaccgttgcaacgttaccttcatatttcacaataacagattctgttttactcgttacttccattacatacccctcttttctccataaagattatacttatataattatagaaaaccactgaaaaatccttcttttttctcaattttctgtctaataatctcgcaatttgtacatttaccgtataaaacatacaattccgttgaaaaatatagaaattaaagtcggtttatccatgcttttcatctatttaccattacaatgaaatggtgtattcttaagtttgataaaaaaacaaatattgaaattcattcgccttactatgtaaaaaaggctttatacccctattttaggtgttgtaataaaggaatgaagaactggaggaacatatggttaataagttgaaacaaacggataactacttcccacatttcctattgctattcattgtgtttcaaccaattttagatttattaacatctttttcaatctatatactacacatgagcgcaacagttggagttgtagtccgtttcgcctttatgcttcttgcattagggtacctacttcttcatcacaaacaacaagatgcgaaaaagtacatcctctatttgtgcttactcgggatcgcactcgcaatcggtcttgtaaataatatgatggttaaatctccagtttcatttggagaagaagttaaattcatcttaaagagcgtatatccaattgtgctactgtttggatatattatcgcctttaaagagctaaaaaataaagagtatgtattccataaaatcattacatatttcttatatgcaactttaattttaagcattacaatgattgtcgcaatgcaaactggaacggatttcccaagctatcctcactcaaaaatcggttcaagaggttggttcttcgctggaaatgatttaagttctcttttcgccattatgttcccaatcattgtcttatattcgattcataaaacaacttctttctcgaaaatatattactggattccaacaatacttgcgatgtatgcaagtattatggtcggaacgaaagtcggatatggcgcaattgttattacattaggcgtagcacttttcttctcattcattgaatatatgataaatcgtaaaaaagaaggaaaaggattcacacatattgtaaataccgttgttgtcgcagttatactaggaggtttaattgctcttacaccgcatactcctatcgcaaaaaatatgggcattcacatgcaaatatacgaatacaaaaaatcagtacaagaagagaaagatcgaaaagaaggaaaagtaattaaagcagatccagaagatgcaaaaaaacatgcaaaaggtgaacttacagattctgaagtaaaaagtttaatttacagtgatcgcgacaaattcttaaaaacatacaaacaatactataaagacgcaccgctttcacaaaaactattcggaatgggttacgctggtaactacacagataaaattaaattaattgaaatggacttccatgacctatttttcgcctttggaattgtcggtttccttatttacttaatacctcttctatactttggtattaaattatttatccgcatgatcacaaactttaagaaaatcatgaaagtaaagtatatgctattagcgagcacactcgttctatcacttggcattggctttatgtctggccacgtattaacagcaccagccgttagtattttcttcgttgttatactcgcttatatcattgttgattttgaaattgaataaaaagaaggtgctacgaaatattagtagcaccttcttttttatttaattaatgttttacgtattctaagctttcttttgcaatatacgcttctgttacagtaggattatctgaaataactttaacccacgcttttccatttattatctcttcaccagtaactgtgacaactacatttgtatttaaacgatacagtcgctcatttgatatactaggattctttttcacttccacgttattcatcacacgtgcaagtttgtacttgttgtattcttttttacctaaataagaatcaaaacggttcatatgccccgctacttttttcccccagttcgcatcagatgcatatttcgcatttaaaccagcagctttatcacctgtatatgttgctgtataacgccaatgtcctggatttaaatatccttcattcatgtataattttgctgcatgttcaatacaatcttcttttgaattgaatgcttctccgttaccatacggactatcgtctgttgcttttaaaccaaataaattatttttgtcttttgcaagagcgcttgttccataataactttcatgaattgctaatgaatataagaataatgcatttacattatacttgctttctacttctttaaatttctttcctaaaccaattaatggagagtctggtttaatcgatttcacataactatctagttgttcagctgtataatctgttttcgaacgtaatgataaataattgaaatattgatagaaagtttcgtctccaaatgtctttccatctacactatacatttgctgtccttgcttcatgaaagaaggtgccacaccatatctaaattctgtatatccaggtgaacttgtattatatgtataatatttatggtataaatatccatctgatttcacataataagacgactgtttcatttcatttgtaggaattaaagtgatttcattcttcttcacataacctgtcaaaccagaaagttgaactttcacacgatcttcgccaacttctaatactttcaattctgttccatactgaatatacgtatatactgttgataaattctcatcataaatattaatgatgttttgcccagttattcttttcgcacttgcaaaaccatctttaatccataaaaattcgttctcgtattttaccgcattcatacctttattttgagcagccgtaaccgcttctttatacgtattatagcgctctacttcttgctctgttccgttttctcttacatttgtcacaacatatttcttagtttctacaggattgctatttccgtttttttcaatcgtctgaagcatgcgatccaacatagctgaagccatccctcttgtagctgataaatgtggtctaaatgtattatcttctggataccctttaataatttgagtagccaccataacttgtacatgctctttatagttaatactatctttatcagtaaaggtaagcggacttacagctactttaatatttttatagtctaacgctcgctttaccattatcgacatttcttcacgtgtaatcacatcatttggtgagaatgtctcgttcgtacgaccattaataattttcgctccatatgctctacttacaccatcatataaaccgtaagtcttcggcacatcctcgaaattcgaatcagctttcggtaaatttaaagcccttgctatgaatgtagcaaactctgctcttgttactaatttatcaggcgcatatacattgtctccataccccattaaaactcctttagtaataagtgagcgcatattcgtctcaaacatatgtcctgtaatatcatcatttgccgcataacttgaaataggagttaaaagtaatgatcccgttaatgccactgctgttataccttttgaaaaagtcttcaaggttatcctcctcgtaatctacgaatttattatcacaaatttgattatataataatcacaatcattttagcataataaataggaattaaaataaaacgttttttaattagaattttcattaaattcaaaacaaaacaaaagacactttacttttttaataaagtgcctttttccatatgatcaatgagtttctttgttgcctgtttgccttgcaaccgaagctcatctattgtcaattgtaactcttgctgcacagttccttgttgcattaattgctttttcgcaatttcatataaatactcagcactccattcgccatccacacttcctataactggctgattcacttgacttaaaaacgaatcaattttcggatcgtatgaaatcccgaccattggagttttggctacagcagaaaaaactagtgcatgaagacgcataccaattagtaatgaacattgtgataaaatgaatattttctcgtcgatatccattttatatggaagcatatacgtctcttctcccattaagtctactacttcacgtgaagctttttgatcaaatggctcatgcattggaacaaatagaatttggtatccttcttgctttaatttttttaatgccgcagctaatttttttatataatcttcttttgcattccaataacgcacactaaccgcaattacttttccatgtatcgaatgcttttgcaaccaatccgattgttttgtccgtttccatgttaaaacagggtctggaacaatttcaatatcgttttttatgccaagttcttttaaatataaaaacgaatcctcatctcgaactgatacataggaagcttttgacaagttccattttactaatagacgattatatccttttgtaattggacctattccttgtgaataaatataatacggcttttttaataatcgagcgagtcccataatacccgtataatatagaatactcttcgtacttgtctgatcttgaagaaggctcccgccaccgctaataactccatcactgttttttatcgcatgataaacagcttttatatcccagcgatctaccgattctacaccatacatttcctttgtatatttagaatcatttgatagtactactagttctatatccgggttctctttacttaacgattcaataattgattgtagaatcgcctcgtctccaacattataaaaaccataatatcctgataagactaaacgcaccctaaatctcctccaaaactaggtaaccgtttatttcatctaacataaactagtacccattccttacctaaacacttgataccctacatagtttcctctttatcagttcatatgaattataataaaaaattaaatttctatatttatcttttcaaaaatggtattttgtttattgatatccattttaatttcaaagcacatacaccatacaaaatggttgtaatacttaatgctataccactgaataataacgtcataattcttgaagttgtaacatctatcacattacataattcatacaatcctagtcccaaaatacatgctattgctagcacaccgaaaaagctttttaaatgaatagaataggcaatatagcttcgaatatacaaatgatttacaatacaaatcaatacgtaagtaattaatgtactatacgccgctccatctatgccaaacttctgcacgaacatcatgtttagcatgactttcacacaactcgcaccaataacaatccatgcagcttgtgcagaacggttaatgccctgtaaaacacctattgataataccataaccgcagtaaaatacgaactgccaatcataactgttaacatactactgccttttacgtctgtgaacaatccgacatttaacggtacggttaatgccatcaaccatattgttaacggtgctgtcaaaacatgcgctagtcgatttgtattttgaattgttattttcgccaaatttatatctcttttggccaatgcggaagttaagagtggtattaacggaaatacaattgcacttgcaaaaataacaattatttgtgtgaatgcaaaaccgcgactgtatattccaaattgttcttgaatttctgttgatgatccttgtaatacatgcggtattgtaagcgagtctactaaatttaaaagtggcattgataaagctccgatagcgattgggatcgatacccgcaatatctttttgccgttttctcttaaatctcggagcgaataggaattgcttttattgtagtatggacttctattatattttatacgcaaatatataagcgaactaatgactccaagaaaagagccaaccatcgccccactagtaataacagtattactcttatcccatgatactagtatgtaagcaattattaacataaaaaacacacgtacaaattgctcaatgacctgtgatacccctgttggtttcatatcaccgaaaccttgaaaataccctctatacaccgccatgtatggcgcaatgagtaatgctaatgaagtaataagcaacggcattctagtttcttgtccaccgagcatattcgcaatttcaatagaaaataatacaatgactaaacagccgaaaacgccaaatgctatcccaataattgacgctgatttaaataatttcgcaatttccttttgcttatttttttcgttcaactctgcaattagtttcgaaattgcaagtggaactccggctaccgataatgtaagagcaatcatatatacaggaaaaacaaggcgaaaaataccgagcacttcatctcctgcaatattttgtaatggaatttgaaaaaaactaccaagcaattttgacaaaaaagttgtaatggttaaaattgctgctccttttacaaatgttttattcatattttttctcttttcttttatacatatactctcaaacatattgttttaagcgatagggattcattttatcccattggttatcataacaaatttattataggttgaatacttggtttttttttcaaaatagaaaagcgaacccatttaagcctgtctcttcacaatatttttctaattccttccattatatatgtacacactataagcgtttctgttacgccaaaagagcccttcctctctgtcactgcgatacatattactaaaaacattataaaaacatcccacaactctacattataatttatgtaaaattgtgagatattctaattactatctaaacacttaagattttcaattgctctttctgttcatcgcttgccattactgcgattgttttttcaatactcggatgtacttgctcaagctttacacttgctcctactttatttgattgctcaacaaaatttaataatgccatagctcctgatacatccatataacgcacatctttcatacgtaaaacaaccggtgacttcacatcttgtaaagtagagaaaatacgatctactgataggaaagagagcggcccttgaattgtgtacgtttcttctttttcttttacgatagaagttttacgttctttacatttcaccatatatatgatgaacgaaagaataataccgaaggcaacagcaatcattaaatcgaacttcaccgttacaatcatcgttacgagcataacaacgacatcacctttaggagcgacatgcatctttttcatgcttccccaatcgaacattccaataccagttaaaattaaaatacctgataatacagcaagtggaatatattgtacgaccgaaccaagacccataataaaaataaataagataacactatgcatacatgccgaaagtgccgttttaccgccacttcttatattcacgatagaccttacagtcgcacctgcacctgctaatccgccaaacaatccgctcatcatattaccgataccttgtccaacgagctctttattacttttatgacgtgtacctgtcacattatccattacgaccgatgttaacaacgagtcaatcgatcctaataaagcaatactaagcgctggtaaaataagtgctgctattcctgttccacttaaagatggaatatgaagcgtaggtatcgcttctggaatggttccaatcttttcaattactttatttagtgaaagatttccgataatcggtaactttactgtaagtccttcgagtagagaagaaaataaaggaagcaaagctgtcacaccgactagtgctactaaactagacggaatcgccttaatccatttgccagaaacaatcattacaataatcgttaacacaacaagtaaaaaactattttgtacgtgctttatttcgcctaaaataatgattaatgcaataccattcataaatcctgaaacgacaggatacggaatatatcgaacgtaagaaccgagcttacatacaccgaataaaatttgaaataaccctgccatcataaaggcaataaaacttgcctctaacccgtgcgtcgcaataactcctgttgcaataacggtaattggtccagttggccctgttacttgcccaggtgtcccgccaaataacgctgcgaataaacctgcaaaaatcgcaccatacaatccaacaagcgcaccctcagacgttcctgtcgcggcaataccaaatgcaatcgcaagtggtaacgcaacaatcgcaacagtaaatcctgctaaacattcctttgctattttttgaaacataaaaaaaccacctttgtataaagtccatgttccattgtacacctaaaaagatacattcgttagctcactttttacattctcgtgacgtaaacgtattcaacgaaaagttttccccttatctttggaaacaattgcaactatgctataatgaacaaattaaatcttttactatatacttggaggcactatgctaacttttgaagaaaaattatcgattattgaatctttcccagaactagaaagaaagaacgtatcattaaaacgtgtaaacttccactttgaagaaagtcgtttagataaaaagaacgttgtatttcatttacacccaaatggaaatggatttgtatatgcaagtggtattaaaggttataaaacagatgataaaggcatggttaacatccgtgagttttcagcagaggagttacgttcagtaattgagaaatcaattgaccttctatcacaagaagaggtagtagcacctgtagaacctgcgaaagaagaagaatggcagaacgaagatggtcatattcttactcttatttcagaggatgacatgtggaacgtgtacgctggtgtaaacttagacggtacattcaactcttatccagaagctgcggaataccttgatgaagaaggcttttcacgcaaataaaaatagaaacctatttcattcaacgacttttatagtaatcaaagaagacacttaaggtgtctttttttgttatataaactcctttctcacactatctctactaattttcataaaatgattcagaggaggtttatatgaatacgactgctaaattaataaattggaaagaacatggcgatatgattattctagaatgtgaattaaatggaaaacgcttcgagatatcaacatataaacaaagaatatataatgcacaccttttatcagatgacgtttatattcgtttagactcatctgataatataattggaataaatatttataaaaagtaagaaaagccccctattccgtaggcgggctttatctttattacacaacatcagagtatactctctttttttcatacagtttatgtaattatacatattcatcaaaaaatacactaaatgaatattacatgtagtaaaatataacttgtgggcacgttctataaagcagattcttttaaaaggcgtaacatatcaattattataggggatgtggcgtcacttcaatattgatctcaaatctcttgtcttttgtgaactaacaatctagtgtatatagacgattctgctttatagtatgtgtttacactcataacaaaggggtaatggtaatacggatagattcgtatgaaatgaaatggttcaagtcggagagaggcaccttaaggtgtcttttctttttggacattacatccattttgtttttccaccttatttcaaatgcgctaattaaccttcaacaagaagaaatgagaattaacaaagatattgtttcttctgtttaatatagaaaaatgaagggtaccccatagatatggggtatccttcattttttattttttcgcacctttcaatgactccctcagcacaaatttctgcaacttcccgctcgcattacgagggagttcatctacaaataaataatgacgcggacgtttataatctgctagttcatcactttctttgcaatacgtttctaaatcagcttctgttattgtttcatctttcttcacaataactgccacaacacgctctccccataattcgtctggctcaccaagtaccgccacatctaatataccaggatgactatgaaggaaatcttcaatttcacgaggataaatatttacgccaccgctaattaccatatcatcaacgcgatcagcaacgaataaataaccgtctttatcaaaatagcctagatcacccgaatgataccatcctttatacatcgattttttattcgcttcttcacgattatgatagccagccatcatagttgggccgcgcaaaataatttctcccacttcataaggaggtaatacatcctctggttctgccggtgcatcctcgttcggtttcacaatacgaacttcatggctaaagcatggcgtgcctgctgaaccagctttcgtaatttgatcctcctctacgagaaacgcaacaactggccccatttctgtcattccgtatatttgaacaagatcaatataaagacgttctttacattcttttactaacgccggtgccattgctgctccgccgtatataccaatcttcatcgaagttaaatcatactgagctaaatctttttgcaacaacatattccacattgtcggcgctgcaaagaacgtcgtaatcttttcttcttgaatcgtatgtaatactgtttctgtatcaaaatgatgcaaaataacattctttccgccaacttgaatgcgtggtatgattccagcgtttaattcaccacagtgatataaaggcgcaacgacaagccctacactatctctattatatttaaggaaatacgtacaaatcatactatgctcagtcatttcgcgatgacgatgtaatacgcctttcggatgacctgtcgtaccgctcgtataaagcattgaacaataatccatttcatcaatttcgatatttactttctcagaagatgctgcattcactttttcatggtaggaacttgcataggaaggtttatcgttttctatagaccaaaaagatgtatttggaaaatctctttcaattatagcaacagttgactcaactgctttttcaaagacaacgactttcgaggatgcgtcctgaagaatataagatacttctttcgcctttaagcggaaattaatcgggttaaagatcgctccgattttcgcacaggctaagtaaacgtttacaaattcacggcaattatataagtaaacagataccgtatctccctttcttactccgtcttctaatagagcgtgcgctgttttatttatttgttcatcccactgtttatacgtccagcgaatattcttttcaggttccactaacgcctctttattcggatacttaccaactgataaatcaaaaattctccctatcgtcatgtacatgccaacaatttcccccttttctctttcataaatctatcatttcgtccataagtagacattgtcctttaatgatttgactaatttttctgattattatcgacatagttttacatacggtaccactagacggtaaatgaaattatatcagcgattttccagatatatcgaccgtaacttgaaatatatcggcgattttcaaaatatatcagcgcaactcgaattatatcagcgatttttcgaatatatcgacttaccgacaaaaactgacaagatataatcggaccgcccgttactgcaggataaaaaagaggttgttccgactcggaacaacctctttcttcttatgcaaatagctcttctaaaattttcagtttatcttctgtatatttcacaaagccatcgttatatgattttggatctttcggatttgcgaagtgcgtaattgctcctgtcttcggatgaacaaatttacttgatgcaccacaaccaagtccgataattgattgtacttcttccataatgacaatgttgtaaatactttcttgcgtcggcattgcataaccaacgttctctaagttacctaaaatattcttttgacgatataggtaatatggtacgtaattatgcttttgcgtccactctgctgcttcgtgcatcatcgctgtaatttcttcgcgacctgctactttatatttacgtttgttttgcgtcatttcagaagcacgtttgaatgataacgtatgaactgttaatgattctggcattaacttttctgtttcatctaacgtatgtttgaagatatctaacccttcaccaggaagaccaataattaagtccatattaatattgttcattcccatttcacgagctaaatggtatttctcaattgtttcttctacagtatgatgacgtccaattgcttttagtgtctcttgatggtatgactgcggattaatactaatacggtcaatattccatttatttaaaacttctagctttgctggcgtaatcgtatctgggcgacctgcctcaactgttacttcacgcacatttttcacatctgggaacgcttcatacatttcttcatacagcatatccatctcttctgctgtaatacttgtaggtgtaccgccgccgtaataaatcgtcgtaacttttacacctttttcttttaaaaacttaccaatttcacgaacttcataatgtaaaccacccaagaacgaatcaacagagccttggcgtccattaatcgcataagccgggaatgtacaatatgcacatttcgttgggcagaacggaataccgatataaatacttacttcttctttcaaacggtataaatccggaacaactgctaattggcaatcaacaatgcgctgaagaagttcaattttctcttcatgaattaaataactttcacgaagctcttgatgcgcttcttcttttgacataccattttgaagcattttatgaagaagtttcgtcggacgtactcccgttaaaataccccagctttgttcaataccagttaactgctgaagaacagaaagatatacataagaaacaacatgcttcacttgcttcatacgctctttttcatctgtgaaagcagataaatctttcgagaatgtttcttcatacacatttcctgtgctaacatccgttaatcgagcggatgctttcacattatcctcaatgtgtatatcaacgataagatttgcttcctcttgttcaaatccaatcgtactatcttcaaaaaataagccgccaatattttgtagcggacgtaaaaaacgatcatcttgtaacgttttaattgaaattaacaacattatcaccttttcatttgcaaactctctttagtttacttgaagggcgtttacaggtcaatacagaaggttttacctgtttctcttacattttttcaaataattctttttatgaatatcgctcatgtatatagacatcatgattttctcttgttaaaatttattagtactaaaatcgatacatagtgaaaatacaatataaaaaggaggaatgttaacactagattccataatctaatgtgttaaaaaaaatatgaaaaagaaattttatagtgttttaactctctctcttgcattacaaactgttcttgcacctacttattcatttgcagagagtgctgaaaaatccgctgaagtatatacggaagatcaagtttttaaaagtattaaagagcatgttaatgagcatagtactcatgaagaagatatcgaggttactagccaattcctactatacacttcaaaaaaacattcattatataccgcgaatgatttaaaaaacaaatcgaatatcgagattacagaacaagtcgtaacggcgacaaagaaaaaaggaaatgcttattacataacgacgccaactggcgctggatggatagataacaatgataatagcttagaagttcaagagattcataaactatctaatcaaaaattaatcgtaaaagaagaagcttccatacatgcccttccgttccaatcatttaaagaagaagggaaactacagccacaagtcataactcctactgaacaagctggaaattggtttaaagtccaaataaatgaaacagcaaaatggatttatgcaccttctgctacatttgaaggtacaaaagcttcattattaaaaaacagtcgtactgctaaaaatagtttattgagatcgccagaagctctacaaacaaacaatatttatggcgttacatttaaagaaatgattgtcccaaaaggaaatgacgatattcgccctggctacccgatggtacctaaatatattacgattcacgaaacagctaatacagcgaagggtgccaatgctctaaatcatgcaaaattcttagataatcaagcacgcggaacagctgatcgcgccgcatcttggcatttcacagtagatgataaagagatttaccaacatcttccagtaaatgaagttggatggcatgctggaaataaaactggaaactatgaatctatcggaattgaaattgccgttaatcaagatggaaactatgaaaaagcggtagaaaatgcccgtaaattggcagcttatttaatgaacgacttaaatatttctctagataaggtccaaaaacaccaattttggtcaggaaaaaactgccctgcgtttatgattcaacgcggacaatgggatgctttcttaaaaggaactgaaacatactataaggaaaatcaaaaaaatcccgtaactgatgacattacaggtggatggtatgaacaagacattcgtcaattagcagctagaggcattatgcaaggagaagggaacggcaagtacttcccagaacgtcttgtaacgcgtgctgaatttgctacactaattactcgtgctttacaattaccaagtggaaatgctaatttcacagacttagaacaagtacacccatcgttaagagacggtattaatcgtgcagcaagcgcaggtataatccgcggacgtggtgataatacatttgatccaaatactacaattacacgcgaagaagctgttattatgatcgatcgttctctaaaacacgctggtatttttgcaaaacaagttgaactaccattcgtagaccaaaacttaatttacgctaaagaagaagtacaaagagtgtatggatacggaattgtaaaaggtaatgaatttaatcaattcgtaccaaaaggaccatcacaacgtgcacacgcagctgcatttataaacagaatgcttagcgtaattgaagcttaacatatttatcattccatatagatattttcattttatctgtattcacttaaaaggcatcagagattatatatctctgatgccttttatacatcttttagctatttttagccatgaatcttaaacgtattcctaatagcagaagcataaaaccgatgaatggaacgtaattcgtattgtgtcctgtagctggaagttgttgattattagaagaaccttgtcctttttctggtaaattaggtttttctactccctcacctggtttttctgttccttcacccggcttttctgttccttcacctggcttctctgttccttcacctggcttctctgttccttcatccggcttttctgttccttcacctggtttttctgttccttcacctggcttttctgttccttcacctggtttttctgttccttcacctggtttttctgttccttcacctggtttttctgttccttcacctggcttttctgttccttcacccggcttctctgttccttcacccggcttctctgttccttcacccggcttctctgttccttcacctggtttttccggacctttttctgtatctttttcatttgtaatttgaagctttacaacttcaattttttcattagaaatcgtaaatttcatttccttatcggataaagtatatccttctggcgcttggatttcttttaaagtgtaatctcctggttctaacttcttagaagtcgctttaccgctcttgtttgttgttaatgtgtcgatttttgttccgtctttccaaatttcaaacactgcgcctgctaatattttatttgtattattagcgtctacctttgtaatttctaattgacctgtaatttcttctttcactttttcattcataacttcttgttttactacttcatttgctacaacatttacttctactgttacttctaacgctttataaccttctggtgctttcgtttcttctaacgtatactttcctggcactaagctttcgaatttcacaacaccgtctttattcgttgttttcgcttctccaactacttgaccagcttcgttctttaatttaaattctgcacctgctagaacttttccactctctgcatcctttttgattacttgtaagcttcctagttcttttgcgttttctacttgtacttctactactttgtttgcttccacaacgacttcaatttcttcttttaacaacttatatccttgtggtgctttcgtttcttttaatgtatactttcctggttctaatttctgtgaaactactttaccagttttatctgttcgtaacgtatctacttttttaccatctttatacacttcgaattctgcatctgataatactttcgttttatcttccgcatctactttcacgatttcaaattgacctgttactttttcggggatctttttattcaccacatctacagtcactactttattagcctctacatcaacagaaactgaactagatgataattcatatcctttcggtgcttctacttcttttaatgtatagcttccaactggaagttgtttcgataaggcttcacctttatcatctgtaacaattgtttccacaactttcccatctttatcgataacatcaaattttgcacctggtagaagttgaccagattcactatcttttttcaataatttaaattggccattctctacttttctcgtattcttcataacaagttcaattacgtttgtattatcaattgttactttgactggtgtatcaacttttatatatccttctggtgcatttatttcttttacaaaatagtcaccaaatggtaaatctttaacttccgcaatccccttttcgtttgttgtaacagtagccacaacgttattatctttgtctataacatcaaattttgcgtcttttaaaacaatattttcatcgttttcatcaacttttttaatttgtaaatgtcctttttcagctgctggcttattccactttggccagttaaatttaaagttatgaacctcaaaaccatctctttggtgtaatcctccaacataggcttgtccattaatagaaccaccttttgtttctacaactgcattaggtgcaaacacactacctactacaccatatcctttagttgttatctttttagcattagggaacacccaaatgactttactagctaactcagtgaagaaggaattagggtcatatgcttgagaggtattagctaatgtgaacccgcccttatctgtcgtatcatacaggattgcaccgccaccaaaattaacttcttctgcatctgaatgaataacaataaaatctttgttacttacatttggaagataaacatcctttacattgaatggttcttgcccttctaatcctgaagagacataaatattaggattctttacatcttcaccgattccaaaggtcatacccgattttggtttatcagtatgtaattggcccgcatcctcaattacgctatcaacgtcttttctaaattctttaaacttagcatcaatctccgcttgctctttataagagatacggtcatatgatgttttcattgcgccatctgggtcaccgtcttttgtcatcgccactgttccatcttgaataattacttgtcctgctcccgctttcgtaaattgaccgcctagtaataatgatggatatccttcatctacccaagttgctccagctaagttatttgctccagttgcagccgctacgactgtataacttgatgcgttcatatttttctgaacagccatcgcaccttcaatatccgcactcgttgcactatgatctccaaaaatgatggcgttgtaataagatacatcacctaaaccttttaattctgttgtagctgcctctgctttaaatggtaaatggattaaaaaattcatacatattagtaatacaactattaaactactacttaactttttaattttttgattaaatgatttcctcaagaaattcattcccccttttaaacttcctaaaaccacaaaaagaagtacatatcatatgtaccaaaccttactcacattaacttaaaataatccatttaaataaaacaaagaaacactacaactacttaataagattgctacaattcatttttgaaataatacgtgaactaaactgtcatgcggaaatacttttacgtatgggagcccaataaaattaatctgaagaatatttcatgtggtgtaactgttttggcaacatcatccactttacattagttttctaaaggattcaagtgaattgtatagatttcatacacaattcatattttaaaacgctttcactgtttttaataagataaacaaaaaaacgtagccaaaaagctacgtttttctgtcatcgtttcggtgtatttttatgattcttcaaaaacggaagcgggaattgcttacggaaatgctctttaatcatatactctacaccgttttcactatttgaacgtgtgatccaatctgctgcttgctttaattctacaggcgcgttccccatcgctaccccaagtcccacgttttcaataacctctaaatcttccatactatctccaatcgcaaccatttcatttagcgaaatatttaaatgctctccaagcaattgtaatccacgtaactttgatacattttgcggtaaaatttctattcgttttgaatcacattcaacatactctacatcttggaatgcttttcttaatgtatttagcccgcgttctttttcacctttagtttggaaaagaacatcaatttttggcgccgctaccggatggtcacgaagcgcatcacctaacgaatctacaaattgaactggataaaataacgggtctgcacttgataatacagtgcgcgcaattaagtttggtgtatttctctcacgatttccgattgaaaaccgttcatgagaaatacgtacgttacaatcaaagtgctctaacacttgcacaatgttaaaagtcttctcttcagataatcttctttgaacgtacggcttatctaacgttgctgaaacgaaagcaccaccatgtgtcactaatatagaatctaattttaacgcctttgctactttatgagcggattgaaaattacgactcgtaaataacgtaacatatacatcttttctttttacaaattcaattgtttctcttaatccttttgcaatttttccattgttgtatagtagtgtcccatctatattaagagctagtaagcgataaatcatgtcgcactccccctcttcgctgttgtactctatccataatttatgaaataaacccgataaatagaacgagttagaattactactgaaaatttggtttactatatacatatacacttagtaaaggagatagtacaatgcaggcacctccttctttttatgaaggcgatacgttagaagtcgcaaaaaaattactcggacaaaaacttgttcatattgtagacggaataaagcgaagcggaatcattgtagaagtagaagcatataaaggccccgatgataaggccgcacatagttacggaggcagacgaacggaccgcacagaagttatgtttggtgcaccagggcatgcttacgtatatttaatttacggtatgtatcattgctttaacgttattacagcaccagcgggcaccccgcaaggtgttctcattcgagcccttgagccggtagatggaatagaagaaataaaactagcgcgctacaataagaccgaaattacaaaagcgcagtacaaaaatttaacgaacggtcctggcaaactatgccgtgccctcggaattactttagaagaacgcggtgtatcgttacaaagtgatacgttacatattgaattagttccaaaagaagaacacatatcatcacaatataaaataacagcaggacctcgtattaatatcgactatgcagaagaagctgtacattatccgtggcgtttttattatgagggacatccgtttgtttcaaagaagtaagcatatgttaaagggagagattatgagaggcaaacctgaactaaaaatagaatcagaaaaagtacataaaaggaagaaaaacccaaatggaatgtttgtagcaagaatactacaaattccgaaagaagaagataaactagactttgtccttattttacaaaataaaaaaacgaaaaatattatttataacaaagttttagtaacaacagataacgactattattctttccgactcgctcgtgggaatattaaatggtcatccttatatactgttacagtatgggatgggatgggcttggacatcaattagtagaagtatcagccttaactggtaaagagaactattctatttctgatgagcattgttccgcatatcgggagtaactcaaaataaaagagaagccgaatcggcttcccttttactctgcaccttccgcagttgcaatattatcctctaagttttctcttgataattcagccgccataaaatctgctgtttctggaagtgctaaatgcatatgagctttttgacaaatttggatcgtacagttttctacaacatagtcgaaaacatgtccgcccccgcttctttcatcatcaatgtaatgtaagtggaatccagctaccccaataccttgtgcgtaatctggtgtccaaaatccagcaagcgtaccttctgtattttcaaatgaaaagattggctgtgatttcgtcacttcaacgagcggtgtatacggtttttcttgtcttggaacagttctcgtccttacttcacggaacgtaccgtccattcgaatagcgtaaaataagtttttacttggcatcaattcatgtaataacgcttcaacttcttcacgattcatcggacgctctaccgtataactcatttctttttcaaaaaacgttacagttgcaaatggcgttgtttcttctggctctactttttccgctgaaccgtctgaacgtaaatgataaaattcattatcaaatgcaatcatttcaccgtctaattgatcaaatgtgccgatgccaaaatcaccatgttttttcaaatcttcaaagctaatcacaccatcatatataccatctaatagcgcaagcattgtagatgtttgatatacttcattactcattttcgttttttttgcatcaatatcaattaattgcgcaacagtcatctcaaatctgcctccattagtttaattggtttggtaataatttttcgcttaatttaatgttgtcacgatagtcaattggaatatcaataatgacagggccgtctgctgctaatccttcttttaatacgccttctaattcatcaggcgtgttaacacgaagacctaacgccccgaaactttccgcatatttcacaagatcaacatcgccaaactctgtagcggatgttctgccgtatttcatcatttgttggaatgcaaccatatcatatgtgccgtctctccaaacaagatggacgattggagaatttaaacgtaccgccgtttctaactccatcgctgagaataagaaaccaccgtcacctgatacggaaactacttttttacctggttctactaaagtagctgcgattgcccaaggaagtgcaacacctaacgtttgcataccgttactaaataataatctacgtggttcataagaacggaaacatctcgccatccaaatagaatgggaaccgatgtcacatgtaacggttgtatcgtcactaattaaagaacgaagcgtacgaatcacttgaagtggatgcgtaacaccttctgcaggacgatttggaacttctgcttgttctgataattttgcgcgtaatcgttctaataccgcttctgatttcgtacttaacacaagtttcggtaacttttctgcgatgctatttaccgttaaggcaatatcaccaattaattcacgctctggttggtaatcatgatcgatatctgcttgatggtcgtcaagatgaataatcgttctgtcgccaagtttattccagaactttggatcatactcgattggatcataaccgatagaaataacaaggtctgcttcttctagtaaaatatcacctggttggttacggaataatccaacgcggccgaagaaatgatcttctaactcacgtgaaatcgcaccagctgcttgatatgtttcaacgacaggaagttctgtatccgcaattaatttacgaacagctttcgtcacttcatttgtgctcgctctcataccgagtaaaataactggtaatttcgctgattttattttttctactacatatgtaatatcatttgtgggagcgattccaagctgtggcttagaaagcgcaccgatagactctacagttgtttccgcagtcataacgtcttgcggaagacttactaaagtagctcccggatttgtggaagtcgcacttcgaaatgcattactaagtgcttctggcacattatcaggatgctctacttctacgctatattttgtgattggttcgaatagtgcagcattatccatagattgatgcgtacgttttaatcgatccgtacgcggtactgcaccagctaaagcaacaacgggatcactctccgcattcgcagtaacaagacctgtcgctaaatttgatgtccctggtcctgaagttacaagacatacgcccggtttccctgttaatctaccaatagcagctgccataaatgctgcattttgttcatgacgacaaacgattaactctggtcctctttcttgcaatacatcaaatacagagtcaatctttgctcctggaataccgaaaacatgtgtaacaccttgtttaattaaacaatcaacaacaagatctgctccttttgtttttgtcttcacgtcgtttacttttacacctgtactcaaactaatcattcctttgtttcataatttgtgtaataaagatttttaatttcacctagttaattaatgtggtgaagtatcatttatcattatattacaaatgcattatttttccaacaatatgaattcgatattattttgacaagatttaaagaatgcgcttacaaccttttgtttatcttaaaataacatttttatatctcttctaaaaatgtacaaaaatacttccacttattcacattattaacaaatttatagtaccttgcaaagaacaatagcaaatgatatatttgtaaataatggaataaccattatttggaatctttttttataatttatatatacccttcaaaaggtagatatagattgtgctgtttagaaagaagataagattctcaactgtaattcatcattctataaaggaaagtgattgttatgaacaaaaatgaatttttggaacaacttagttcctctctgcagaatatgcctaatttagaaaaggaggatattatctcggagtacgaaactcattttattagtggtaaacaagatggaatatctgaagaggaaatttctaaaaagctaggaaaccctaaaactatcgctaaagaacttaatatttcatatgtaatcagtaaagctgacaagaaacgcagcctaaaaaacattatgacagcactgttttctgttatgagcttaagtcttttaaactttatatttatcattatcgcctttttcgtattactctttctattaccgcttcttctaacacttataattgccactccgttattaattatttcacctatcttattaataggattaggattctttaaagggtttcatcaaatcagttattccgatgtttacaatgtattcatagccttttgcatcggcttactaatatccgtcatatgttatcaaataataaaacatctatacgtagctttagttaaatatttgaaatggaatgtagctattttgcaacgacactaatgcaaaaggagattaagatgaaaaattatattttatatccactcatgttacttacaattttatttctatcagcttgttcaaacagtgcacaacctaaggaagaaaacgatgtacaatctattaaagatgttgctattaaagttccagaaaatatatttagttcctcaaagaaaaatgaaactattaatgaagacgaaatgaaacaaaatataaaaaattatatagattatagttggaagttatctgaaaatattatccctctcgcttcaacaaattttgataagaatttcacggaatctgaccgagaaaaattacaaaaactaattgatttagcgaaacaaaacgatatgaatttccatgagtttattagtaataataatttacctactgattataaaaaaccttcaaaagaaatctatgaatttatgtcatcatctacggatattttcgtagagctagatcaagaattagacaaactcgcccaagatggtaacttattcaaggccaatttttcttttacgaaacgccttgagaaaataaatgggaggaaacaaaaagagattgaaaagtttttgaacgaaaaaaatattaaaacttcaattaacagcaataaaaaaaattaaccgatgtgttacatatccctttcaaaataatcaataagaaatggctattttgaaagggagtttttgtgatataactattaaattccctaaacaaaaaagacgctcctaaactaggagcgtcttccactattacgcttgttgttgcgcgctatataattcttcaagtggcttcatgataattttgttaacgtcaccgattacaacgtttaggcgttgctcagtttccattaattttgtaattttagcatcttgttgaatgcgagctacaacttcttgtgcttgttggttgtcttcttcagtgatttcttggccttgcatcattttttgttgtaggctaagttgcattgtacggaactcatcgaataagttctttgaagctgtgtcagcttgaactgctgcgtagctctcttttaaagttttgaagtcctcgttttcagcgattgctttttgtaattcatatgcaacatcatgaatgttctttgtcattttatttttcctcctttagaaggctagcgcttttcatacgcactgccttttcagtgcatttacatacgcacctcttcttaccatatcaaactatgcaagagatgtgaagaaatttcacttttatttctatgtactcaccttattatctaagaaacaatagtaacaatccttgtacgagcccgatcattccgcctaataacgctcctaaatacgtaatcattttcaattcgtttttcgtaatagacagaactaagtcttctaatctttctgttgagaatgtagacacttcttgctggacaatttccgcaaggtgtagattgtttagtatactctctacgttttctgttccccactttaagcctttcgttactgcacttggaaccactttttcaataattgtttctcgaactggttcacatacttgctgaacagattgatttaaaaacttactcactgtttcctctactttaactgctgacagcacggagcttacaatcatttctttctctacaaatgcttctaattcttttacatctcttccttttaacttttcccactctttttgcagtacgtcagttaaaagctgctttgtagcatcttgccctaaaaacttaataacttctggctgcacacgatccacaacacttacatttcctaaaaacatcccaactaagttaagtagcgttccacgagaagcaaagaaatcatcaatcatttttgaaagacgcgctttcccttcttcactttcaaaaaagctaattcctcgctctaaaataaacgccgaggcattcggaatcgcattctctatcttttcatgtacagaatgaggtaaagcctgttcccatgtatatgtataatactctgctaaaaatgcatgaattttttctgtaatcacatgttcgatttttcgagtcgcttcttcttctacatgtgctacattccatttttctaacatatatcgcagtgattgttcattcgtaattactttatccacttccacttgcgcccagtgaattaaacctttttgaaactcttcatttgttagcttttttccgattccttctggtgttaacaaatgttctacaaccatttttcctaattgaacagcaagttcatcacgccgcttcggaattaaccctggtgtaaatggaacttgaaactttccgatataaataggacgatgaggacgaaataacatttttatcgctaaatgattcgtatatcctccaataattgctccgagtcctgtcgtcgttaacatatttaaccatatattcattacaatcaacctttcacttctccaaaactatagcatatcatcatacggacaaaagtataatggtataaaaacgtatttgcaatatatagcttcgcctattatgcaaatagtagtaaaggagtgatttcgttggttctcggccttttaacttctaaacttcattatgagcaaacgtattacaccgaaatcgctaaacgcgctcggctttatcataatgtcgttgcccagtttacgccattttgtattgatcctaaaacagaccttgtttctggtcttatttacgatacagatacaggaaaatggaaaaagcaaacattccctattccttcttatatatatgatcgttattcttttcaagaggaaacagactttgaaaaagtaaaatcaattattcactctttgcacaatcgtccttccactacctttttaaataacacacttattaattcaagtgaactacatgatttatttctcactaataaaaaactgtctccttatataccaaaatttgaaattgcgacgatacaaaacattttcaaactgttgttaaaaactaaagatattattatacgccccactaatatacattctaaagataacttatatcgagtcgcttacaaaaataaaacgtttcagatcgatacagtaaatgaaaaataccatacttctatttcaatcaaacgcacagacgaatttatatcttggtgtaaatctaacatacgttcatcacgttacatagcgcacactatgctacaaccaccaaatcaattaacatatccactgcacattcgaaccattttgcaaaaaaacaaagaacaaacttggaatgttatcggtcaatttatacaaaaaagctcatttcctaatcagcttttaccctcagcaacggacgatgattcattgcattcattttcaaaaattaaatacgtactatctagtacaggtgtgcaactattgcacgacgctttacacgacattataaatgaagtattccaaacactagatcagtcttattcttcgttatttgaactagaactttccacaattatggatcaaaaaggtgcaatctggcttatgtatgtcaacacgatccctccttacgaacaatacattcgtcatagtgattcattagctgaaaagatatttcacggaccacttaaattcagtcgctttacaccataatgaaaggaggtaaacctattttgaaagaacatatatatacattaaatatttcagatgaacatccaaatagcattactttaccttacgttttttctattacaccacctattacatccctctccttcggcatacgtcatatagcaagtgaagaagtaaaaattcattattcctttactcgcgaaattattatcggaaagcatattgccgaaaaacttttactgcctcaatcaactactattcatgcattcacacaaaaccaaacaattattttcggaccattaatcggcatttttacaactggctttaacgatgattcttctacccctttaggaaatcgttcaattgctctcagtgagttgttaacaccaccattctcattacgaccgttcgtattcgtctttggcgttcaacatataaactgggaagaagaaacaattaacggatatttctttcgagagaaacaatggataaagaaaaaggttcctttaccaaacgtcatttacgatcgactaccgaatcgacaagcggaaaattacaaaccaattgtcagagcaaaaagaaagttagaacaagactactccattccatggtttaacccagggtttttcaataaatgggaagttcatcaacttcttatgaaagacgaatcaattaaacccttattaccaaatacagaagcatttcagcatttcgaacaagtagaacggtttcttggcacatataaatcagtgtacatgaaaccaatacacgggagctttggtagaaatattcatcaaatattttattctcaaacagaaaattgctactactgtcgttatcgcgaaaatgaagaaaataaactaagaaagtatcaatcattagaaactcttctaaaccacgtattaaaaggacatgatttaaaaaagtttatcgtacagcaaggtatttcgttacttcgctttgatggtcaacctgttgatttccgcattcatacaaataaaaatcatttcggtaattggatagttagtgcaatcgtcgccaaaatcgccggcaaaggcagtttaacaactcatgtaaatagcggcggtgatacaaagttgctacaagagctttttccagattcaacgaagcaagttcaaattgaaaataaattaaaacaaacagctctgcaaataagttatgcactcgacgagcaagtaactggaaacatcggtgagattggtttcgatatcggtttagacacaaaggaaaatccgtggttatttgaagccaactctaaacctgggcgaactgtattccaagatgccaaattaaaagaacaaagtgaactgacacgccaattattttacgaatatgccatctacttaactgaacattccttacgtgatgcaaaggaaaaaatgtcccagataaaatccgggacttcatcaaacaccgaacatatcccttctcctatgattcactcacaaatacaaaaacaaaaacttccacctagataataaggtggaagttttctatttacacaagttttactacaacctcagtttccacgttacatactccgcaataaaaaatatgattgcaatattcatttgaattattatgcgttaaaccatctactgcacttaataattcttgatccatataggcactataatcgtctatataatctacagacttcccataatcttggagtatactttggcaattttgacaagaatatgtttgtgattctaatgcattgcaaagcgggcaaatccccatcatgattcctccatacgttatcgtttaaagcctctcttttttagagtgaagagagcaacctatccaaacataggagcgcccactccatccctacttaaaaatagaactataaagttgctaccgatttcatttttatttcaataaatcataaataagaagctaataattagcctacaagtagcaggctacaatgagaaaattatatttaatatcctccttagtttggcctgttttcttaaaaatacaacgattactcttatttcataatttacgaaatcaataagtttttttgacaaaatttacaaattattattttgtatatctttctaggtaacatccatactatgagtacaaacttaattaccgatggattagcgccaatcggggcgataatctggttcaactccagctagtccaaccaaaaaaacttttataactctaaggaggatatattcctatggcaaaccaaaattcttcaaatcaattagtagtaccaggtgcaacagctgcaatcgatcaaatgaagtacgaaatcgctcaagaatttggtgtacaattaggagcagattctacggctcgcgctaacggttcagttggtggagaaatcacaaaacgtctagttgcaatggctgagcaaagccttggcggattccacaaataaatatatatggcaaaaaggtctcaaggcatatgccttgagaccttccttaatttattgcaacatttgtaaaaacttcttcgtacgttcttcttttggatttgtaaatacttcttctggtgtaccttgttcgacaacgacaccgccatccatgaaaataacgcggtttgcaatttgatgtgcaaaacgcatttcgtgcgttacaataaccatcgtcatgccttctttagcaagttctttcattactttcagaacttcttgaacgagttcaggatcaagcgctgacgtcggctcatcaaatagtaacacttccggctccatcgcaagcgcgcgcgcaattccaacgcgctgttgttgtccgcctgataattggaacggatataagtctactttatccgcaagaccaaccttttcaaggaaatagtttgcttttttcttcgcttcttctttccccatctttttcactgtaacgagcccttccattacattttgaagtgctgttaaatgcgggaataaattatggtgctggaataccatacctgtttgcgtacgaagattgacaatatctttcttcgttactttttgagagaagtcgagttctttattaccgattcgaatattaccagcgtttggtgtttctaatacattgagacaacgtaagaatgtcgttttaccagatccagatggaccgataataacaaccacttcccccttctcaactgataaatctatatgctttagtacggtattatctccgaaacttttttgtaaatgctgaattgaaatcataaaaacaaaaactccttttgtaaaaggattattttaatgtatagcgttctgaacgcttttctaacatctgttgtacgattgataataagaaacaaataacccaataaataagacctgcttcgaaataaacaattaaaaattcgtagttcattgccgcaatttcctgcgcttttcggaacatttctgttactaaaattaacgatgctaatgaagtatctttcactaagctaataaatgtattcgaaagcggcgggattgatacgcgcgttgcttgcggtaaaataacacgttttaacgcttgtgggtatgtcatcccaattgtataagcagcttcccactgccctttcggaatggaaaggatagaagcacgaataatttcagatgcatatgcaccgacatttaatgaaaatccaacaactgctgctgtatatggctcaacttcaatattaagagttggaagaccatagaaaataataaatagctgtacaagaagtggcgttccgcgaatgatagatacatagatacgagcaatccattgtaaaatacgactaccagaaatacgtgcgagcgctgttaacgttgcaagtataatcccgataataaatgtaataagcgttaatggaattgttgtaaaaacagcttccttcagcataggcatgaaggaagtctgcataatatctatccaagtagacaatcgatctgaaactaatgcactacttagatacattttcaccgaaccattttttcgttattttgtcatacgtaccgtcttttttcatatcttctaacgctttatctacttcttgtacaagcttagtgctacctttacggaataagaatccactttctgaagcttctttttcagtatctacaattttaatttttgcatcttttttcgtttctaaataatttaatactgataacttatcattaattgtaaaatcaacgcgtcctgaagctaataattctgccgcttggctaaatccttctacaccaataatttccgcaccgtttttcttagcaatatctgcatagttactcgttaaagattgtgctccttttaaaccttttacatcagcaaatgtagcaggcttatctttatcttttgcaataactaatgccgctgaagatgaaacgtacggtttagagaaatcatatttcttttgacggtcttcacgaataccaacttcgtttgcaaccatatcgaaacgttttgcatctaaaccagcaagtaagctatcccattgtgtttctttaaatacaggttttacacctaaacgttttgcaacttcttctgatagttcaacgtcaaatccagttaatttattgcttgaatcatggaatgtgaacggtgcgtatgtaccttctgttccaattacaagttcaccgctttgttttatcttttgtaacgcgtcttgactagctgtatcttttttctcttctttaccgcagccggctacaatcccgatcgctaatgtagttactgcaagcactgaaaataatttcttcatgatagtaatcctccaagtattctgataggaatttaaaaactatattgattgtatgcaatcttgaacaatttttcaatgaaaatgttcttatttagtttatcctttttcttcataatcaaacaaaagggaaaaataatgctacatacaaaaaataagtaacattttttaatatagcatttattgtacgaaaggtaaaataatacttcttatttaactgccctgattcactaaaaaaagaacttgtgaaaatcacaagttctctcccatacctattaagcgctctggttcccttccatttgcgttttgtacatatcataataacgcccgcgctttttcattagctcatcatgagaccctttttctaaaatggttcctctatcaagcacaataatttgatctgcgcttttaattgttgaaagtcggtgagcgataataaatgtcgttcttccttttttcacaacttctagcgcttgttgaatcatcgcctctgtttctgtatcgatactagatgtcgcttcatctaaaattaaaatggctgggtcaaaagcgagcgccctagcaaacgatataagctgacgttctccggttgaaagagtacttcctttctccgtaatttcttcatttatattgttcgcaaatctttcagcaccaacatcacgcaatgcttttacgatgcgctcttttgaaattttttcattttctaaacttacattagatgctactgttccgctaaataaaaacggatcttgcagtacaattcccatatgttcacgagttgcttgtttcggcatctcttttacatcatgaccatcaatcgtaagctttcctttttcaaactcgtaaaactgaaagagtacgttcataatagaactttttcctgatccagtatgaccgacaagtgccacggtctccccttgtttcgcttcaaaagaaatattttttaacacttcatctttcccattataagaaaacgatacattatcaaacttcacatttccttgtaagcgaggcatacgctcttcttctactgcttctcctttttcctctaacaattcaaaaacacgctctgatgcaacacgcgattgttctaagttagcaagctggttcaccatattcgtaatcggtgagaacaatcgtgttaaataatcaacgaacgcatacagtatccctagagaaatgacgcctgtagcacttaatgaagcgccaccgaaataccaaatcacacctgtgaaagcgatatttcttaatacggatactaaattatgagaagttgctgcatttaaattcaaaattttattttgatacttaaaataatcgccatttaattcttcaaactcttttttcgtttcacgctcttgacggaacgcttgaataattggcatcccttgaatggattcatttactgttccgttaatatcagataaacgagagcgcattttatgattgtatacagacgcgtattttctataaagaattgcccaaacgattaaaatcgggataatgagtaaacataacgtcgccaattttacatcaagtaaaaatagcgcagcgaatatcccaataatatagatgatacttgaaacgaatgtcgcaagtaccgttacgtatagatcacgaatggcttccgtatcattcgtcacacgcgacacaattttccctgctggtaaatgatcgaaataacgaattggcaacgtttgaatatgagaaaaaacatcttccctcataatttgaataattttgttcgctgccttttgcaagaagaactgctttccgtatgcaaataatgatacgactactaataaagcaaaatagccaccaccaagtaggagtaaacggtttatttctggtttataaaacgcaaacacttcttctttcgtcaatgctttcgctttatacacttgcaccgccttaccattttgaacggtaatcatatccccttttacagtacgtgatccttccgcatttactttattcggtacaaaataatattgaaaaccgacttgcatcacgcgtacttctttcccttttttctcgccttgttcaaagcgatcacttcgcttataaaaagccccattatacgaaacagcatcttcactctgttctgtttcataccaaggtttctctatcccgacgatatgatcgtcaatcatcgttttagcgacgaaaggaccagcaagctctgcgatgacgaaaataaataacattaacatcgcagcaaaaatcgtccctttcactttcatcgcgtattgaaacaatcgttttgaaacgctcatattttcaccccactatccgcactttcactttcaccttgttgtctttcaaactgttcagcataccagcctcccttttggataagctgagcatgcgtaccttcttctataactgcgccttcatccataacgagaatccaatccgcatgttgcactgcagataaacgatgcgtcgtaataatcgtcgtctttccgcttctttccgttcttatattttcaatgatcgctgcttccgtacgagcatctacagctgataaagaatcgtccaaaattaaaatttctggattttgaataacagctcttgcaatcgagatcctttgtttttgccctcctgataaagaaacacctttctctccaactagcgtttctaacccttctggtaaaaactctaaatcctttttaaacgcagcaatttcaatcgctttctctagttcttcttcagtcgcttccctatttccgaataaaatattttctcgcgctgtttttgagaacaaaatatgctcctgcggtacataaccaatccagccgagtacattttcattcgtcattttatccagcgtcacatcagagactgcaatatccccatctccaagcggatattgacgaagaagctgacggacaagcgtcgtctttccgcttcctgttttcccgacaaccccaagcgtttccccttgttttaatgtaaacgaaaccttttttaaatttgtttcagttgatgaaggatatgaaaaggtaacatcatcaaactgaatataatccggctcttgcacaagctttggatgtttcggatcctttacatctggttcatacgctaacgtttcatttacacggtctaacgaagcgtttcctctttgcataacattaattaattcgccaattgcaaacatcggccaaatcatcatccctaaatacacgttaaatgaaacgagttcaccaagtgtcacctttgattgaaatacaagatatgcgccgtacactaaaccaattaaataactaaggccaacaagcattttcacagttggctgaaatagtgcatcaattctagctaccttcatatttttttcgtagacgtcatctcctaaatgatgaaatctttcttgatctgcgttctcttgtacatacgcacgaataacgcgcacaccagcgattgactcaagtactttatcgttcatatcaccgaatgcatcttgcgcaacagtaaatctttcatgcaatttctttccatatatattcatcgcatacgccataatcggaagcggtataagtgccgcaaatgtaagctcccaactaattgtaaatcccatcataaaaacgattgtaagcatgtataaactagaatccacaagcgttaatataccaaaaccagctgtcatagcgattgcttttaaatcattcgttgccctcgccattaagtcgccagtacgatttttttgataaaaagtcggcgtcatcttaagtaaatgccccataaatttagagcgcatcgttttctcaagtacaaatgcacctccaaacaattgatgttgccatacgaaagtaagaccatacccaacgattgtaacccctattaaaataagaatagattgcataattgcttcgttcgataacgttcctgtttttatattatctatcgtaacccctaacactttcgggggaataacttcaactatattcacaattaaaagagctccaatggcaatactatatctcttccagtgctccctaaaaaaccattttaactttagtaatactgataacaatgtaacctctcccttctcgttctcgtttacctctcatttctttatccactatccagacccatcacatttacatttcgtaacccatacaatctcatcacatttttccaccttccaaagttttttatcggaaccaaacaagggaaaataaacaaaaaaaagcataccgccgcttgacgatatgcacaggaatgcataaaaagcgtacgttacgatatacgcaacgtacgctttttataagacaaagatgccctatatatccgtacgggttgcgtaatgatatgaatgttttctgccatttaacagagctaagcccattacatttacgattacaatcattacgcacacccccttcatttattttccatttataatcttacaactttattgagtattctgtcaattattttttcacacttcaaataaaaatatatgatacaccattttgaaataagggaatgttctgtaagaaagggcatacaaaataaaaaaagaataagaaatcgttttcacaaacatttcatttgaaaaatgttatcaaaccccctacaatcaccttatactcactcttacaagttgctattttaggaggactaatcatgacaactagcaatacgtacaaattttatttaaatggagaatggagagaaagctcttcaggagaaacaatcgaaattccatctccatacttacacgaagtaattggacaagtacaagcaattactcgcggagaagtagatgaagcaattgcatctgcaaaagaagctcaaaaatcatgggcagaagcttctctacaagatcgcgcaaaatatttatataaatgggctgatgagctcgtaaatatgcaggatgaaattgccgatatcattatgaaagaagtcggtaaaggatataaagatgcgaagaaagaagttgttcgtacagctgacttcattcgttacacgatcgaagaagctttacatatgcacggagaaagcatgatgggcgatagcttcccgggcggtacaaaatctaaacttgcgattatccaacgcgcaccacttggtgttgtattagcaatcgcaccgtttaactacccagtaaacttatctgctgcaaaacttgcaccagcattaattatgggtaacgctgttattttcaaaccagcaactcaaggtgcaattagcggtatcaaaatggttgaagcactacataaagctggccttccaaaaggtcttgtaaacgtagcgacaggacgcggttctgtaattggtgactacttagtagaacacgaaggcatcaatatggtatcgttcacaggtggtacaaacacaggtaaacatttagcgaaaaaagcttcaatgattccacttgtattagaacttggtgggaaagaccctggtatcgttcgtgaagatgctgacttacaagatgctgcaaaccatatcgtaagcggtgcgttctcttactctggtcaacgttgtacagctattaaacgtgtacttgtacacgaaaacgtagcagacgagcttgttgacttattaaaagcgcaagtagcggaactatcagttggatctccagagcaagatagcacaatcgttccattaatcgatgacaagtctgctgacttcgttcaaggtttagttgacgacgctgttgaaaaaggtgctacgatcgttatcggtaacaaacgtgagcgtaacttaatttacccaacattaatcgatcacgtaacagaagagatgaaagttgcttgggaagagccattcggtccaatccttccaatcatccgtgtttcttcagatgaacaggcaattgaaattgctaacaaatcagagttcggcttacaagcaagtgtcttcacaaaagacattaacaaagcatttgcaattgctaacaaaatcgaaactggttctgtacaaattaacggacgcacagagcgcggccctgaccacttcccattcatcggtgtaaaaggttcaggtatgggcgcacaaggtattcgtaagagccttgagtctatgacacgtgaaaaagtaactgtattaaacttagtttaatcttataaaaagaagctgatctataaatagatcagcttcttttctatataaatacttccaaaaaacagcgtatttcgttctacttccgatttggttttccaaatcgaactaaaacatgccataataattttaattcctgaagcacttcttcataagttccacgatcactccaagataatggattgcatttcaaatctactacagcagagccaattatatttgcatcgatacaatgattccgtgcaatgcgtcttgctaaagatggcatttttgaacctctaaaatccattggaacttcgtctaccataagtacaaaaccgatgtgccaatacaaatcaatcgcatacttcaggcaaatttcttctaaaactttccctacatccgtacccttaaatgaaggatctgcaacaagcgcctccacgtcttctttaagagaaatctctccatgaatctgcgcttcaatataatgattaagattacgggctggctctttgcttactaaatctataaacggccttttcaggttagctagtaaatgattaattaatattgttggcgtcaaattcccttcaccaattgcaaaatctcttacgaatgtctcttccaaaagagcagctaaaatcatatcaaactcctcataagtccccttttctttcggatcttgatgcgaatctaaatatgtatatgtagagcgcgaagaaacttttggagataagagaaaataacatgaaccaaaacgcggagccggcccatctggatgtaacattaaatttagcgctccgtattttggccgttgatcattcgttacgccttctaattgatatgcccctccaaatattctcttttcccaaaggtcacgttcaccaccagggtaagcagatacgcttccattagatagcaatgtttcaaactgacttttatatactccttgctcaaacagtgcttcagcaacacttttcatattcgaatctagtctgtctggatgaaagtgtaaagcaatccttgcatgagattttaaattagcgacagcttcttcaaatatttcatctgtaatatttgacattttaagtatatgattaattgttgctttagccccacgtttttcgttctctgcatattttgaaatatactctaaagcaaataattgagaccttgataattccataatcaaatctcccctttaattgaaatgcctttaaacacttcaattaaaagcttattctttccttcttatgaaacgaacctcatttattaaaaaaagtaatttactaaatcttaattatgtatacacgcatttttcataggcaaatgtacacattctacagaaatttgataccctagccatcgctcagcgatatgttcaaatgataaaacagatcccgttgtaaaaaagcgatgcttcggattcagattgtcagacaaaattcctttgtgctgtaaaatagtacttaactctatcgctgtttcttctgcagaactaataatcgttacagcctctcctaactcacttttaatcacaaactcttctctataatctgattattactatatccattgacggataaaaattcatttgttactcttaaagacgttaatttaatatttaaatcctcattcgtatctcggtgaggtagaggttgcaatcattaagagtatcatttcaggagatgtagtggcattgatgaaggaatgagaaaggaatggttgccgaagtaagtcgtgtccaccatgcacgcttgctgggtctgcatttaataagtgcagaactgtcacaaacgtttcgtttgtggagagctatcgagaggtatgtcgtgggtttcttataagatagaaagcatgtagcggcagattacgtgctttttttgttttgtttgggacttctcttcctgactcaggaagacatacatatctcctcgcttgacttggttatactaactttggaggtatttttctatgcaacaaaaaaaatggggcttttgggtactaacagctttcgttgtcggtaacatggttggcgctggtattttcatggtaccaagtacgttggcacaaacagcaagcccactcggtgtcactttagcttggttaactacagggtttggtgttttaatgctagctcttgttttcggtaatttagcaattcgtcgtcctgatttaacgacagggccacaaagtcatgcatatgctttattctcaacaccaaaaaagaaaaaaatggctggcttcagtatggtatggggatattgggttgcaaactgggcaagtaacgttgccatcattacatcatttgcgggatatttatcactcttcttcccaattatgaaagatacgcgactactattttcaatcggctcgtttaacgtagaagtcggaaaactaattacatttacgatttgttccatcttactttggggaactcatattatattaacaaacggtgtaagcggagctggaaaactaaacttcttagcaacaacaacgaaagtaactggattccttttattcatcgtcgttacgttatttgcattcgaagcttctaagtttggacaatggtacacaccgatgattgataaatcaggtgcatcacatggtcttctttcacaagtaaatttagctgctcttacaacgctttgggcgtttatcggaattgaatcagccgttcttttatcaaaccgtgctgtttctccaaaaacggtaaaacgtgcaacagttgcgggattacttattacagttgcgatttacttaggaattacaattttaacaatgggtgtacttcacgttgataaattacaagcttctgaacgtccattagcagatgcactaaacgctgcaatgggtcacggcggcgggaaattgatggcattacttgctcttacttccctgtttggttctatcttaggctggattttattaagctcagaagtaccttatcaagcagcaaaagaaggtttcttcccttccttcttcacgaaaacaaataaaaaaggaagtccaatttactcattacgattaacaaacattatgtcgcaagtattcctattctcaacattatcaggaaccattgcggaagcttatacattcgttattaccgtatcaacactggcctacctcattccatatctcgtttcaccaatcttccagttaaaactagtcgcaactggtgaaacatataaaaatgaaatgcgggcaagaattacagatggcatagtcgcagttatcgcactttgctacgcactatgggttattaaaactggcgcatccgatataaaaacgttccttctcggaattggtttattcgtaattggatttgctttctatccattaatgaatcgtgatcagaaaaaaaataacgaaaagaaaaacgggcaagttgcataacgcaatttgctcgttttttcttttgtaaaacatatataatagaacaaagaggtgaaaaacatgtcaatcgaatcgctatggagcagtcgcttccaacaacatattcaaaatatcattacatactttgcacgtatgattaacggtttactatatagctttatctttatttcatgcgttggtgcatattattatgctcagtttctaaaagcatctccttctaaaggaatatctttaataattataacgattgtacttacattcattataacgagatgccctatacgtacatttattcaaaaacctgatgctgtctatttactagcactagaagagaaattaacatcttatttcaaaaaatctcttctatacaattacatcattcagcttttcccattgttatttacgttccttattctcgttccacttgctatgcaatcattgcaattaacggtacctttcttatgtacaatctttatcgtgttaatgattatgaaagcctggaacatgtacatacattggatgtggcgtgatagtcacgaaaaaaatatatggctgatcattcgtattacttgtaacgccctaatcatttacatgctgttttattccgcaaatgttctcatattgggcggactactcttactacttgctttcctacttctatatacgaaaaaacagcctacaaaacgaataccgtgggattacataatcgagcaagaagaaaaaatgaacgttcgtttttatcaatttgctagcattttcaccgatgttccgcaactgaataaacaagtaaataaaagaaaatggcttacaaattggattgaacctttattacataaaaaacgagcaactttcttctacttacatacactagcatttttacgtggaaatgattatttcggtatatatattcgcttaggattgatcggtgctttcgccttatatttcataccaaatatatacgtaaaaggcgctatcgcttacatcgttttatatatgatctctatgcagcttcgttcactatggaaatatttttcgggaaatattattgtagcattatatccgattggtactgcagaaagaatgaagcaatttcttagcttaatctttatattgctaagtattcaactcattgtattttcgagtgttatactcattgctacaggtcaatttttacatagccttatcattatgattgtcgggttactctggatcaaatttattattgtaccaaaaacgaagcaaagaatttccgcattttaacgaaaagaattatcttaaaagccaaggagaaaataaattttctccttggctttttatttttcctcctcaaacaagaaccatttaaacaaccggtattttatgatttttacatacaaagacgataatacatgtttacgacctaataaaaagggtatctattaattaacagagtaaaggagggtcctatattgtgaataaaaaaacggaacaattgaagcatcacgttactgacaatcaatgcaaacatgctttaacaacaaatcaaggggtaaaaatagctgaagatgaattttctttaaagatgggcttaagaggcccaaccttaatggaggattttcactttcgtgagaaaatgacccattttgatcacgaacgaattcccgaaaggattgttcatgcacgcggggttggcgctcatggttattttcagctttatgaatctttagaaacatatacgaaagcagattttcttactaatccttcaaagaaaacacctgtatttgtacggttctcaaccgttcaaggttctaaaggatccaacgacacagtaagagatgtacgcggattcgccacaaaattttatacagatgaaggaaactatgatttagtgggtaataatatgccagtattctttatccaagatgctattaaatttcctgattttgtccatgcagttaaaccagaaccacataatgatattcctcaaggagctagcgctcatgataccttttgggactttgttgcgcataatcctgagtccactcatatggtcatgtggcaaatgagcgaccgagctattccgcgtagtttacgaatgatggaaggttttggagttcacacatttcgactcattaacgcagaaggaaaagcccatttcgtaaagtttcactggaaacctaccctcggggttcattcattagtatgggatgaagctcaaaagattgccgggaaaaatcctgattttcatcgtcaagatttatacgaagcaattgaaaaaggggattatcctgaatgggagcttggattacagctaattccagaagaagatgaacataaatttgattttgatattttagatccaacgaaattatggccagaagaagaagttcccgtaaaattagttggtaaaatgacactgaacaaaaatgttgataacttctttgctgaaacagagcaggtagcttttcaccctggtcatgtcgtaccaggtattgatttttcaaatgaccctcttctgcaaggaagattattctcctatacagatacacaattatctcgtttagggggccctaatttccatcaaatccctattaatcagcctgtatgtccttttcataataatcaacgtgatggtatgcatcaaatgcagattcatcgcggtcaaacaagctatcatcctaatggattaaataacaatcaacctgcaaccgtccaagccgaacaaggaggatatgaacattatcaagaaaagattgatgggcataaaattagaggtcgcagtaaaagctttcttaacttttattctcaggctaaacttttctacaatagtatgagccctattgaaaagcagcacataaaagaagctttttgctttgaagttgggaagtgtaaatcagacatggtgaaggcaaatgtaattgctctcttaaaccacgtcgatcgtcaattagcacaagaagtcgctaacattattggagctcctttacctaaggaaaatcacgaagtaaattcagatgcaaaatcacctgcactaagtatgtccaatactatttttaaatctgattccaaaaatgttgcaattctattaaatggtgacccaagcgtctcacttctgtccgaatggattcaagcttttgtacaacaccaaattaactatagtatcatagataataaaatttatcagttcaatgattccattaaagtaactgacacttatacaacaacagactcctccctttttgatgcagtattagtgtttagtagtgagtctgtcattcaaccccctgttttagaatttgcagaaactacttttaaacattttaaaccgatagctcatgtccttagtaatcctcatgctttggaccatagtaagattaaactggatggagcaggagtttacaacttaacaaatacttcaattgaatcatttatagaaggcattgcccaaggaagattctggagccgataatataatataaggagcggattagaatgagtaaaaaaattgctattttaataacggattatttcgaggatacagaatacacagagccagtagaagcttttaaacaaaagggatatgaattcacaactattgaaatggaaaaagggaaaacggtacacggtaagcaaggaaaaagtgaagtcgtgattgataaaagtattgatgatgtttctccagagaactttgatgccctcttcataccgggtggattttctccagatatacttcgtgccgatgaacgttttgttcgctttagtaaagcatttatggatgcggaaaaacctgtttttgctatttgtcacggacctcagctactcattactgcacaaacacttgaaggacgcgatgtaactggatataaatctattgaagtcgatttgaaaaatgccggcgggaactttcatgacaaagaggttgtcgtatgtcaaaatcagctagtaacaagtagacagccagaggacatcccagcgtttattgaagaatcgttgcgtatattaggataactaatttggttaactaaccttgtatttacatgaaaataatgaatcagtggggttttattcatcccccactgattcattagccctcatcaactggtcgtttacaggaaatccgaccaccacaaatagcaagataaataaaaagaggggaatccaaaagttcagttttaataatcttttggattccccccttttctcgcccaaaaattccttatcacttttcataggcatttctcatatagtgaaaatgactatataattcctatccataagttaaataatgatttcgcacatatataaatacaaaagatgggagccctatttatgaataacaatccaccttcaacgccccaagacaactccgaaaacaatagccgtgatattacactgcaaacattaagggtcatcggactcgtcgtccttattagtggttatatcctcgttgcgctctctgaagtaggtgagctgaaagtcttattaacaaacccaaatagcaatcctgatttagctgaagttgatccgttttaaaagccatatgaaaagcgatttctagcatcgcttttcatatcgttttatccaatctgagaaacctccccctcatacttctctctccctatcgccttcataaatagtaaaatactgctcataccaacgataaagtacagagcactcatgccccaagatgcaataaatgaacctagcataacacctaatgccccgttcatttttgcaacttgaaagaccattccgttaatcgccatatatgaacctctcgcctcatttggcaccatatctgccataatagattgacgcactggcacatacatcatctcgcctaccgtttggaaaagccctgcaattaataaaatccataagctattgctcgttccgagtattgcaaatccaatcgtgtaaataaataagcctacatataagattttcaaatcgttgaagcttttcagcattttaataagaagtgctgaacataacacaactaaaattgtattctctgcagaaatccagctcaacatgcgaatccctgttaaatcaaacgtaaaaccattcccgaataaaaagtgcaccgtttcaaattccttctgcaagcgaacacctaaataattattaatttgaaactctaaagacaatgtacatatacttgctgcacaaaaaattaaaaaagctctatctttcattacaactttataactatccgccatatcttttaatacatttttcttctctactgtttttctagccacatacacctcttccatatatactgccattacatatagagtaataatcgcaacaagagttaatacgataaacaattgtaatctatagttttcaaatagtaatccaccaaatatcgctccaattgcaatggataagttaatagcccagtaattaatgctgtacatcacttttcgattttcaggtgtactcacatcaattaacatcgcctctgtcgcaggattcataagtccagaccctaaactattcactagcataaagataaatgttaaccacggtgagtcaacgtaatccgaattcgcaactcccatacaagcaatggaaatgacttgtatactttgaccgataatcataacctttttacgcccaagccggtctccaacatatccaccgtataaaccaattactaatgaagctatgacattaataagtagtaacgcaccagcaatcgcactacctaactttatggaaaaataaatcgccataaatggaaaaatcatcgtggacacagtacgtgttaaaaacgatgttataattctaatttttatatttcgatgcatactccaaaatcccattgtttcccctccttatgcttacttattttactttgaaaaaaaggaagaaaaaggttagaatattctaaagagtttccccttttatgatagaaggaagtgtatatatgaaaattatggactattacattagactaagactacatgcacaagatcaacaacatatgcgaaatagcttacaagaattagcggatgttttatattgcagtacgaaaaacgtaaagattttattaaagaaaatgagcgaggagcaattaattagctggactccagggcgaggccgcggaaataaaacggaaattctatttatacataatttcgtagaagcgattgagtcctatacagatgaactgttagcgcaagaaaaattaaaagatatctttcttcttttaaaagaacccctccccctcgcacttcaaaaaaagatagaaaataaactacatcatcattttggatacgaaccttcaaatgatatgtacgacgtattaaagattcctatatcgagaaagatattcccattagatccggcttttgtggctgtaactacagagagccatcttacgagtcaaatttttgatacattagtcgtctataacgatgttactgaaaaaatggagcctcacattgcgcatacgtgggaattaagtgaagacgggcttacgtggactttttatttacgaaaggatgtatattttcataacgaaacagttttaacttctaaagatgtacaattttcatttgaaagactaaaagaagtttactctcctttcgaatggttaacagaagaaatcgttcaaattgaaacgccatcaccactacaaattcgattccatttagcgaaaccaaatttatttttcttacactatgtaagttcaatgcagctcgcaattttaccgcgtgatacgagtattcaaaatcatcattatataggtactggacctttcaaacttgctcattactctgaagataatatcatactcgaagcgttcacccattattttaaagagcgcgcgttattagaccgtattgaattttggggtattcctgaccatgtgcaaatagatgctgattatgaactaccaaacgaagaggaaaatgaaaggcatgatatacaaatagaagaaataggttgtatttatgctagcttcaactttaaaaaacctggtcctcatcacgacatttactttcgaaaagcttggagagaactatatgatgttgaaatgatacttcgtaacatagagggtagacggacaattgctgcatcaagctttttccctgatagaagccgccttgcaacaagaagatcctactctttagaaaaggcaaaagagtatttgaaaaagagtacatataatggagaaacgatacatatttacttcttcgcatttaaagatagtgcaaatgacgcatatttcttaaaagaacgatgtgaaagtttaggtatacaagtagagcttcacccatttcccgtttcagattatatgaatcgctctattgataaacatgctgatattattttcatgggagaagtatttgctgccaatcatgaaattgcattcttaaatgtatttaaaaataaaagttgcttcgtaaatcggttcatggacccgcactacgaaaaacaaattaactgtttactagatacatttttactagaagaaaataaagaaaagcgctatgaactcatgtatgagattgaagagtttttacaagcagaacacatcattttatttaactatcacgttctaaaaagaaaaacatacccctcttctttaaaaaacgtaacaattgattcattcggttgggcaaattttgcgaagttatggatacagccatccatgtcttaaaatgtgagtcattataaaaggagaaggtactacatccttaacagtaccttcttcacatactattatttaattactccatctaagtgatctttcaagttcactaaaaacttctctatatccggattcttcaccacatcataacaagcaaaactctttaacggactcataccgagaaacttttgcacgcgatgtaaatgactaagcgctgattctaaactttctccttcaaagaactttgtcttatctccaaatgctttttcaggtgcattccaagttgtagagaacatatactctttctcttttaataaaccacctgttccatattcatctgcacctttaaagaacaaaccgtattcatatacttcatccatatacgttttaaataagcctggaacactaaaccagtaaattggtgtttgataaatcacaacatcagcccataaaaacttatcttgttcttctttaatattgtaaccatcttgaatcgttgttgttttcacatgatgattctcgtctaatacagtaaccatataatctactaacgttttatttaatcgtccttcctttgtaccgtatttttcatgtccatttataataaatatatttttcatcgtttttctctcccctatatgatctactcttcagctattaagccgagttgctgctgtagtgtaagattatcttctaaatgccaatcttctgttatctttccgtctttcacatgtaaaatatcaattgcaaaaaaattaattttcttaccattatgcgttcctgtaaaagaaagacgggctgttactttatcaccaacaactaataagtcttcaatctcacaatgtatatcaggcacaactttacgaaaattttgcgctgcaaactttaatccttcaatgccttgtgttcgccctttcggcaatgtattatcgaagaaatctttagtaacagtctgcggaataagttcctccttacctgtatcccaaaatgcataaaaacgctgcgccgcatgaaccatttctgtcgcttcttttttacttagtgagggatcaattgtcattgcttttggctttggcatttcttttaataactgaacttcagttttttgttccacaccacatgctacaagcacaatacaaataacaaacaaactaagaaatccaaataacttttttatccccatggaaatcaccacctccttatataaatcctttttgtttcgtattgctattgtatatgcactaacttcctttatggaagtagtgatatttttttcatatagttaccaaaagtatagttttgtgatactataaagcaaattcatccaaaaaaattttatggaggctagttccatgaacgatataaatccagttgaattaacgaaaggtttaccgggcataccttgtcctatcgctaaaacgcttgatgtaattagtacaaaatggacgtttttaatcattcgtgatcttcttatcgaaggaacattacgctttagtgatttacaaaaatcaatggatggtattagtccaaaaacattatcgcttcgactaaaagaattagagtctcaaggcattataacgagaaaagtatatccagaagttccgcctcgtgtagagtacacattaacggataaaggaaagcaattagaggggatttttattgaattaaaacggtttgggttaagtttataaaatgaaactttaatcagaataaaacaaaaaccccttaccgtcgtaaggggttttattacttcgcaaaactttcagccaactgtttctctctccacataaatgtaatgccgagaccaactattaaaacaacgcctgaaaatgcatatggataatgaatattcatatcaaataatattccgcccatcgctggtcctgcgatatttcctaaactcgtataagtcgagttcataccagcgacgaatccttgctcttttccggctgcttttgataaaaatgtcgttaaagctggacgaagtaaatcaaatgctaagaaaatgaagcaagtaacgagaagtacaatccaataattaaagactacagttgagacgaatgctaatactgcacctacaattaaacatatttgaattaacactttctcaccgaacatttctaccaatttgccaaacataaatacttgcacaactaccccaaagattgaactaattgtaataattgctgcgatatctttcggcgagaagccaaatttatgatcagagaacaagctaaacactgtttcatacgctgataatccgaatgcgagtacaaatacgataataaatgcaattgcatacattggatgtaatgatttctttaaatcaccaataaaacttgattccttcgtattagaagaaatctctgcaagttcttctttcgttaacggttcttttaaaataaagatcgaaatcacacatgctataaaagcaattactgctgcaacgaaaaacggcacacgtataccgtattctgcaataaatccgccgattccaggccctataatgaatccagtactaatagccgcagataagtatcccatcgcctttggacgttcctgaatagatgtaatatccgcaacatatgccgtaacaccaggcataataaacgcagcactaattccgcctaatacccttgctacataaagcatccatacatcttttcctaatccaaaaagaagctctgaaacaccaaaaataaataatccaatgattatcattttctttctaccgtaaagatcaacccaccggcctgtaataggtgaagtaatgagctgtgccattgcaaacactgcaacgagatatcccatcgtcttccctgttaaatgcatatcattcataaaggacggcataaccggaatgattaatccaatccctaaaaaagcgataaatatattactcaaaagaatgaccaataccatcttttgttcttttatcggtttcttcactttttaacacctcttcccgtaagttcctctcaaaaaataatgcccaagaagctttttctttatccttctatttgtgggctattcatgagtagagatgcccccctactcgttagaatttcacactatccttccacacatacatacgcattagatgaatgactatcattcagttttcctcaaaaatgaacctaccttttcagacaggttcatctcactatttctttatatgtagtgcatgtgttaaaaaatctagtacttctgccttttgcaaatcgacttgctcatcatctttatgatcatataaatacacttgttccgctgctgattcaactagagcgataaataacttcgctgttcgctctgcgtgaactgaatcacgaatttcaccagcttcttttgcctcatttaaaaattcacttagccacatataaaggggctcatacacagcttcccattcttttatatgttctgtagatgcaagaccagcatacattaaagcctgtatttcacgatattcagctataaagtgaaacaccgcatctattacttgcgttactttacttgagaaaggcgcatcgttttgcactttttctttcactgcaagtatcatcttttcaaccatcacttctgctattgcaggcataacagataacttagaaggaaaatataaatagaaagttccttgcgcaatgccagctaatttcacgatatcagaaatcttcgttttttcgacgcccttttcctgaaacacttcaatagctgcatagacaattttctcttttttattcatcatctaaaccctttcacacgcatattgaatgactgtcactcattttataagataatcgattgtactgtcaatgatagtgaactctaagaggaaatcatttttttataataaaatctcctaataaacaattaggagataaaaatacaatatatctttaagaaagtgcctttaatcctgtcactccacatacaataagaaacacactaatgatacgcgctttacttttcgactcaccaaacaagaacatgtttaacaaaactgcacctgctgttccgataccaatccaaaccgcataggcgacacttacttgtaaaaataagaaggaagtatacaaaaatgcgaaggatgtagcaaacccacctatataaatcgcaccattggctaatgtcttatctttactatacattttaagtcctatcacaccgactatttcactaattgcagcacaacatacgaaaaaccaacccattttttaagcagctccttccacagtttcttctttattgtcagctaactttaaaccgataacgccggctactaccataagaatgaagaatagtttgcctgcgctgaaacttccaccgaaaagaaatacatccattaagaaagtacctaccgtaccagctccagcgaaaatagcatatacagttcctgttgcaagatgttcacacgctttagaaaggaagtgaaaatcaacagcgataactcctaaaataataatccaatgccaccaagtattagccgtattaaaaccaaacacccaaaaaatttcaaagatacatgttaatatgacatataaccaagctctatttttcatacctctcacctcttatgactgactatcagtcattttgttttaaaaaaatatactctttcatcaatactatataaaaataactatcatcctcatttatcattgtatttgttccatttctaagctaactgcatcctgccataaaaaatgactgaatgtcattcatatgtattgtacatgaacattttaaaaactgtcaataccgaaattttatttaaaatttctttcatccgatttgtatatttcctaataatctgtcaataatgctagtaacataatattttctccactcccccttggagagatcccttgaatggagcagttagcttttgctagctgctcttttttatttatccgcacactatgatgaaatactcatagatcaaatccatttttcatcacataacaacatctatttattttccaatgagcttttgtatgtacgaattttattctcaagcatcttctctgtaacctctaagttttctctttgaatctgaatagatttcctatgatcttctaggagctgtaaacgagcttctgttgtatgctccccttctgtatataatctagcgtattctcttatttttgctattggcatttgcgtttgttttaatttcattacaaactgcaaccactttatatgtgactcttcgtaaagtcgatttccatttgtatcacgatttgcaatcaatatattttccttttcataataacgtagtgtatgtgtgctcaatcctaataattttgctacctcactaattgtatacatactaaactccctccacatgcttatccttatatattttatgaacgtatcaaatttataaaaaacatttgacttagagtatactctaacaaatacaatctaaccataaataaatttgaatttagggggattttatatgaaatacactgttattactggtgcaagttccggaattggttatgaagcagctttagcatttgcatctcgcgggaaaaatttagtacttgtagctcgaagacaagaagaattagatggattaaaattgaaaattaacgaaatgcatccagagttagatgttgtcattcgacgaactgatttatctgttactgaagatgtttataaactttatgaaagcctacaagcttttcaaattgaaacgtggattaataacgcaggttttggtaatttcgcctcaattgccgaacaaaatttaaataaaatcgagacgatgttgcatgtcaatatagaagcactaacaatactctcttctcttttcgttcgagattattcaatggttgacggaacacagcttattaacgtttcatcgggcggcggatacacgattgttgctgatgctgttacgtattgcgctacaaaattttatgtaagtgcctttacagaagggctgtctcacgaactgaaagaacaaggcgcaaaactgcaagcaaaggttttagcacctggggcaactgaaacagaatttgcaaaacgttcatttggtattgatgagttcgaatacgataatgttgtaccgaaattccacactgcaaaacaaatggcaaaatttatgctcgacctttatgataatgataaagttgtaggaattgtcgacggtttaacgtataactatgaacttaaagatccactttataattttgccgtaagacaaacgaattcaaattcttaataacctgtccatttcttatggaaatacatgttcccactatatctgtaaataatagtgggaactttttctctataaatttttttatccaacataccgaaccatcgccacttcatcacaataatccatctttggacaatgtctacaatcaatccatactttctctggcaacgcttctttatttataaaatcaaatccacacttttgaaaaaatactgtttcatatgttaaggaaattactcttcttacatttattttcgtagcttcctccattacatgatttacgagcatacgtcctatccctttccctgcatatgtatgcgaaactactaacgatcgtatttctgcaagatcttctcctaacacatgcaatccagcaactccaacaattctctcgtcttctttcataacatataaacattgcaaatattgataaagagacaaaagagaacgtggtaaaacaactccctcttttgcataaacctcaataagactataaatttctttcacatcactggtcaccgcattacagattttcatattacatccccttgcccctcaatattaatatttataactttaaatgaattttaattcataattttatataataatacagctctcttttctcctcgtcaatcactttatacaaacaaaaaaccaagcaatctaatcgatgctcggttcctcatctcgtatcggtaatactgttgaatatttaatttcacgaagtgccaaactcgtctgtatacgtgtaataccaagcttattcagctttctaataaactgctctagttctttacgatcacgatttgcaacctttaataaataatcgtactctcctgttaaacagtgacattctaacacttccggcatcgattctaattctttctccaacacttctaacttgtcaaattgatgaatattcgtactcataaaaataaagcataataaatcaaacccaagcttttcttgatttaaaatcgcaacttgcttatcgatgaaaccttccccatctaacctttttattcttgcatgcatcgcagccggtgataaattaacgcgacgtgccagctctgcattacttacttgtgaatccttctgcaatatatctaaaattcgtacatccaaatcatccaacactttaataacagacgactccattacaattcctccttttttcttaccgatgattattcgagaaaacaacttataatttatataaaactgaatatttttctgtaaatatcattttaaactaaatattttatcgagttttcaccattatacaaaagaatatattacacaataaagaaaaatgctaaaattatttacaataagtattgattacaaaaaaggggattttatcatgccttatttttacgtctttttactattactaacgagcttattatggggaggaaatttcgtcgttggaaaatcactcgtcgatcatgcatcaccgatgacactgacaagtttaaggtggctgattgcgattgtttgtttattaccaatggtatggtttaaagaaaagaaaatccttccaccacgtaccgcgatacttccgttaatattaatgggaatttcaggagtcgctctttttaacatctttcaatttttagcattagaaaaaacatccgctacgaatgtaggtcttatttctacattgaatgcaatttcaatcgcattattttcagtattatttctaaaagaaaaagtaaatacacttcaaatcctatccatgattctttcattcttcggggtcatcctcgtcctattaaaaggtgatttctcgcttttattttcactacattttaatagcggtgatttatggatgattgcagcggtttgtatttggggaatctattctgtttgtagtaaatgggcaacaaaaacaactacaccacttatggcaacgttgtactctggtattttcggcgttattttattactaccgtttaacataggtagcttcactgtttcaaatataaatacttctttcatcacatcacttttatatactgggcttatttcgacagttctttgtatggtattttggaatattggcgtacaaaaattaggcgcaactacatcaggtatttttctaaacttcaatccaattttcacagccattttagcattcatatttctcggagaagaattaacgtggatacaaattttagggacaattgtcgttgtaacaggatgttatttattttctcatttcaaaactgttgccgttcagccaactagacctttaatacgaaaacattcttaatgaaaaaacatcgtcatctaggttggcgatgtttttatttactcttcatttctcttatatactgcttttcctcttttggcgataaacgttccgtcgccttgccagtatctccaccttgaaggctccataaaaagttatgctcctcaacagtttgagaaaaatctcctttttcccacctatttataatagaaaataacttcattttatattgaaaacctgtactattttcaatatctctttttacattagaaatttccttttttgtcatctctacaaatccccatttttcagaggattttaccttttggtgcaccattttatgcatagtagaaataatttcaccttcactaatttgcggagcttcttctgcagcttttttctctttttcgtttgccgctcgctcggtttgaatatttttattttctttttccacatatgcaagcaatttctttccgccaactatagacgagaaaattactataattgtaatgcatatacctacgatccatttaaaaagcattatctcttcatcgcttccctaacaatatgactatctacatattgcttaaacttcacgatttttccgttctcaagttgccatacatgaacaaattctgcttcaaatgattttcctgtttctttataaactccagaatacataccttcagcaataattacatcttttccgtttacttcatgatatgtatttacacttgctttataatcatcccattctgatcctaaacggctaaatacattttccattatagcttctacgcctttatatgttccgccgtacggaaaaccttctgcctctgtccattccactttttcagagagggcttctgctaaatgctttgcattcgaagaagctgatccttcatacgtgcttttaataatttctaaatttgatttaggcatattacttcctcccgtttatttatttttacacgagacgtaaccatcacagttacatcttgtgtaaaaaaacatttaaattgttttactcttaatctattagctgtaatcattatagttacaatgattcttcaagtcaacatttataaataaaatttacttcgttttcattactttctcttttaagaaacgatctacatatccttctgcttttactacgaataaatacgcacccattgataataatgcaagatctaattcatatcctggattctttccatctcctaataaacctgctgctccatttacctttacgatagctccagctaaaataagagcgaataacaatcctacatatcgtacacctaaaccgataattaataatataccaccaactaattcaactgttgctacgccgtatgcaaggccacctggtaaaccgatgcttgtaaaccaccctgctacattatcgatacctgattgaaactttgctaaaccatgtgcaaagaacgtaactcctaacacgatacgaataattaaattcccaatatattgattcattttgaactctcctttttgttttgttatggtgaacttttatttacaagtcaaaacaatacggtattttatttcattcgtcaaatacttttttaaataaaacaaaaaacattatccgttttacggataatgttttcttacaaaatagcgctaattcaagcttttattctatcgcatagaaaaagttgaaacatttttccagcgccaatataaggcagcaaagaaacgtcctcttccacaaccattccaacaacattcactttctcatctacaggtaaatcatatgtggcaacttgcatctcccctgcatatctaccgtacaattcattatcaattgtaatgctccctttctttcttacaattgtatgcatcggctttatcaccactctatttccttcccttgattctacagatcgaataacatcacgagacggatctagtctatttgtatgcacttgctctaccacttttaatacttctttatcagttataaatgatttgtaacgcaatggaataatccctctacttgcactagctacttcttgcatactttctaaacttgcgcttatatctccaatcaatactttatcaacaccacaatcttgtacaagttctaagtacgcttcaagcgggcgcatattgcgatgtttttctaacgttggtaacccttcatataacggaccacgtttttccgcatctcctggaataaatgccattgtctttattccgcacttctgtaaatattgattttgtttttgtaagaaggactttgctagtcctgtctctgggcgcgggtaaaaattatgccatgcttctacattctctactcttatatgttctgtaagtaattctttccaaaatgactttgtaatcgtactcgcatttaaagctactttcatcttatgagatacgcttgcaatttcttttggcgcaatgccgtaatccattcttaaaccggtaataccccagtccaatagctcttccacattttcatatgttagccctaaatggtgtaacgattttggagaaacatcaaccattagctccatttcatgtgcaaaagcttgtttccctaatatttgaattaactctttatacgtatttggatcatcttctggaatgtgcagtgatgtaaaaatagatgtaaacccatgttccttcgctacttttagccactctttttgtttctctactcgttcttttgaaagataaatggaaactccgatcatataaatctccctctctattaatagaaaaagagaaaggaatccctttctctatatgttttctgccatttcttctttaaatccgaagaagtacgtaaagataaatccgaaagcatatgcaattactaaacctaagaaatatagtaaatatttattgtcagcaattaacggaattaaagatagccctgatacgccaattccaagagaagctgtttgcataactgcttggaatgcaccaccgacagccgctcctaaacaagcagtaataaacggtttcccaagtggtaatgtaaccccgtataatagcggctcaccaattcctaaaaagccaactggcaatccacctttaattacatttcgaagtcgtttgttttttgttttcacataaatcgcaattgctgcgcccacttggccagcaccagccattgctagtactggtaataaaggtgttacgtgtgtttgattaataaattccatatgaattggtgttaaaccgtgatgcaatccgaccataacaagaggtaaaaatgttcccgcaagtactgcgccagcaaatgctccgccaatatttaaaatcgcattaattccgctcgtaataccatctgataagaaacctgctaatggctgaatggctaacattgttacaatacttacaactaatacagtaatgagtggtgtcacgataatatcaactgcattcggcactgcttttcgaacttgtctttccactacaaccataagccatgctgcaaaaataactgcgaataatccgccccgtccgggcactaatgcttcaccaaacaattttacgtttgccatcgccgggttgaaaattaaaatgccagcaattgccccaagaaccggtgtcccgccgaactctttcgctgtattccaaccaactaaaattcctaagaatgtaaagataccgccgccaatgagtagtaacatttgtaaccacgttgcatttggatcagcaccagcgtttttcgcaaagttagcaaccccgtttataattcctgacgcaacaagtcctggaattaacggaatgaaaatacttcctatttttcgtaaaaagtttttcaccggtgtattatttttcttcttaatctctgatttcatctcttgcccaatatcttcaaggtgatgatctgctatctcaccaattcgtagtcctgtcaagccttccatttcagctgctactttatttactgttcctggaccaacgacaacttgaagcgtctcatcttctataacacccataacgccttcaactttttttaaaaggtccatatttactttactttcatcatgaagcgttaatcgtagtctcgtcatacaatgagcaatactacgaatattttttattcctccaagttgctccgaaatttccttggccattctctcttctttcttcataatagaatccccctccctattattttatagtgctttcttcacaaacccttttgcgcattttagtttctccagtgcttccccatattcgcactgcaacaacaccataacaatggcagcttttacgttacgttctgccttttcataatactctgccgctacttcataactagcgcctgttgcttccacaataattcgttttgatcgttctactaacttttcatttgtggattgaacatctaccattaagtttttatatacttttcctacaccaatcatcgaagctgttgaaatcatattcaacactaatttttgtgctgtaccagcttttaaacgcgttgatcctgttaatatttctgcacctgtctctacttccacatttaactttgcatatttacttatttcagcatttttattacaagaaatactcgctgtactcgctcctacactctgtgcgtatttcaagccgccaattacgtaaggagttctgccacttgcagcaattccaatcactgtatctttctcatttaatccaatactttttaaatcttcttctgctaactcttcgcgatcttcggcaccttccaccgctttagtaaacgctttcaatccacctgctataaatccttgcaccattttatcatccgtgccaaatgtcggcggacattccactgcatctagaatacctaaacgaccactcgtaccagcaccaatgtaaattaaacgtccctcttcttcaaaagatttaataacagtctgtacaaccttttcaatttgttctatctctttttcaactgctaacgcaacagttcgatcttcttcattcatactttgcaacactccttttatgctcatctcatccaaattcattgttttctcattacgatgttctgtcgataaattttctaacatattgccaccctctttgaaattatatttcacacttttattataactttaagaaactaaaaatcaattactctttcttattttatgaaataaaatttcacgacatgacatatttttgtcaaagatcataaagtgaaactttaatcagtgtgggttttgttcatccccactgattattagcccgcaccaatcgggcatttacgggcagttgatccccacctaactttctttgcttccgctgaattttgaagtgagggtcttactgcccggcaaatagggggataaaaaaagatgagtctcctcatcttttcttctactttaacttccgtaaccgcaacgcttcttctcgcgtctccataaattgatccaatactttattaccaatccgattgaaagtaatcacatataaagcatcaatcatattcagttgcgtcattctcgaagcaatactcgcaatacgatgatcttgttctacatctggcatacaaaggcgaatatccgcttctttatataggggggatgattgatctagtttcgtaattccaataacagttgcaccttgtctctttgcatactgcgccatttcaagcacatctttcgttcgaccagatgttgaaatcgcaacaaatatatcgccttcttttaaattcgtcacaagtggcaacatcatatgaaaatcagatagcatcatcgctgtaaatccaagccgcgtaaatttataagccccgtccattgctggcgtagctgatccgcctactccataaaagataattttatcggcatttacaatacgatctgcagctttctcaagttctctcttatctattgcagtaacactcgcctcaattgcagctttattcacataagtaactttattaaataaatcatacggtccatcttctgtattcatcactgaaaaatcgttaatattataatcagcaatagttaattcacgaacgagtgctatcttaaatgctttaaaacttccgattccaatcgatttacaaaagcgaacgacactcgcttcacttgcgcctgcattcgttgacacttctttcgtcgttaaattcggtacaatctctgcattctccattatgtacatggcaaccttcttctcagctggtgaaaattgatccatattactttcaattttaaatagtaatgttgaagctttcactatttaacctccacttcttacggttgcgttcacttattttctcttgcttcaagaaggtaataaccatcatcgccaggaggatgaaacacatttacaatgcgattccctttttgataaacagttctttccccttctgtccacttcttttcccaaccgttcatccaaatcgcaacatcaggtaaaaaagcagtatatttcagcttctgaccgtactcaccatctgcttcttccgaaaaaatagaaaccggaaaatctttcacttttgattctttccatgcagtaaatggtatacatactgcaataagtacgattacaccaataaccttctccttcgtaatcttcacacttccctctccttgtcatatcacatacatagattttaccataattacaaacgcttcatgctatatgatcgttgcttttaggaataaaaaaagagcttacctacatcagataagcccttcctctctatgcaaaatatttcttcaaaagtggtggtgtaataatcgtcgtcaatataacaacaataacaatcgctgtgaaattttctttcgctaataaattcgccgtaagtccatttgctgcgatgataagcgctacttcaccacgtgataccatccccgcgccaatactaatagaagattggagattaaatcctgtcagtctcgctcctaaacctgatccgattaactttgtgaaaattgcaatgagagtcataataataatgaaccaaagctggcttccaataccttgaaatgtaatttccattccgatacttacgaagaatactggaacaaatattgcataagcaatcggttcaattttatgttccacttcatgcttatactctgtttgagaaatagcaattcccgctgcaaacgctccaataatacctgcaattcccatcatttcactgtaataagaaaaagagaagcaaataataagagccgcgctaattaacgcttctgttacacgaagcgggacaagcattttcataatccaaggaacgactttccatgcaataaaaacaatacttacaaagaaaataattttctttacaatgacaagtgttatattcacatcttgtgttcctaaaaaactcattacaaatgctaataaaataacgacaatgacatcatcaaatacggcagcacctaaaattgttgtactttctctcgtattcatttttcctaaatcacgtagcgtctgcaccgtaatactaaccgatgtcgcgcaaagtaataaacctaaaaaaatggcatgggattgtattaatccaaacagcaatcctgttacataaccaccgatgaaaggaaaaataattccaccagccgctactgcaaatgacgatttcaaattccgatttaactcttctaaatccgtttcaagtcccgctataaacataagtaacaaaacaccaatctcactcaattcatcaatcagttcagaactattaataataccgagtacagccggaccgataataataccgacaattaacttaccaagtacagaaggctgaccaagtctcacactaatgtcaccagctaatttcgtacaaagtaaaatgacgacaagttcaaaataaaataacatagcatctgctcctactttaactttaatcagtgggtcgttaacccacgtccatttctgcaagtagtttcccctattgatccgcattttatttgtcatatttttatttgacaaaatattctgaattatattaagattaatccagcaattttaaaaaactacataccataactgcacctccacttacttactcttttttaatgggctcatactatagtcgcagttatggaaatgaaaaaacgggggagagagtccaaagtgaagtcattattacgaaaaaaagcgcttagtactgagtcaccaaagcaactagatagaacattaactgcactcgatttaacgtttttaggaatcggcgccgtaattgggacagggatctttgtattaacaggtattgttgcagcaaaacattctggtcctggtattatgctatcattccttattgctgcatttacttgtgcttgtgtagccttttgttatgctgaatttgcttcttctattcctgtctcaggaagtgtgtatacttacgcatatatgacagtcggagaagtcgtcgccttcatcgtcggatggtgtttaatgctcgaatatttacttgccgttgcagcagtagctgtcggttggtctggttatttacaatcattactacaaggtttcaatatacacctgcccgccataatcgcctcggcccccggcgtaggaaaaggtggtctcatcgatttacctgctgtctgtattttacttcttattactggccttttaagttttggtatacgcgaaagcgcacgcattaataatattatggttcttatcaagttagccgttattatcgcctttatcgtagcaggtgcaaaatatgtaaaacctgaaaattggacaccgttcattccattcggatacgacggtattattactggggctgccactgtgtttttcgcctttttaggttttgatgcaatcgcaaccgctgcagaagaaacgaaaaaaccacagcgtgatttaccaattggtattatcggttctcttcttatttgtactattttatatatgattgtatctttcgttttaacaggtatggttccttatacacaattagacgtttctgatccagttgcatttgcattgcacttcgttggtgaagatgcaattgcaggactactcgctgttggagcgatgactggaatgacaaccgtcctcttagtcgttatgtatggacaagttcgcgtttcatatgcaatgagccgtgacggtctacttccaaaagcgttagcacgtgtaaataaaaaagtaaaaatccctttattaaatacgtggattactggcgttgttgctgctttattagcaggccttttagacttacatttgctagcgaatttagtaaacatcggcacgttaacagcctttacattcgtttgctgcgcagtacttattttacgaaaaacacaccctgacttaaaacgcggattccgcacacctttcgtacctgtactaccagttgtcgcgattctttgctgcttatatttaatgattaatttgtctaaaacaacatggattagctttgcagtttggcttatagtcggcttatgcttctatttcttctactctagaaagcatagtcatttagctattgaaaaaacaaatgatgaacagaaaaaggcataacaaaatagctcgccgataaaatggcgagctatctttctatactatcatattttttcgttaacgattgtaaaatgaaaaatatgccgatgcaagctgtaaaccatgcccaatttcctattggtgtcgagtatgtgatcattccaatacccacaagcactaagaaaataatcacctgatatatgagcttccacttttgcatatattccctcctttacttcgtccccttctttttcttcttccaggcattcaaactatcaaagaagaagttaataaataacgttcctaatcctgctaataaaaacgtcattaagaataaaacccaaatacttttatcttttaataaataatatcctacaaggagcacaaccgcgatccatacatattcaagaattctttttagctttttctgttccaacttattcgctccctctttctatgctacttttagtataacaaaaaagaagcctatcatgataagcttcttttcttctctcttatttgttcatacttttttcaacaagtgaaatcgcatactctaatgtacgattcatcgtttctacctgtgcatcttttacttgcacatcttgtaatacagcttctgcaactgtaattttttgttgcaatgatttcactgaaccatctgttacatttacagcttgcgctttcttcactactgcttttgcagattcaatattgatttgtaatttttctttcgttgtttttggttgttcttctgccacttttgattgtacaaatgttacattagctgattttaattcgttatatgtttgaataatttgttccccagtacttcctacattttcaaatgcttgctttgcaatgttatagcttttctctaattcttgaaatgcttcctttgaatattgacctggcttatcaccaaattcatacgtactaactaacacttcttttacttttccaagctcttcaaataacgcatttacttgctctaacttcgtacggttagaaaactcattgtatgatgctaatacttctgaagaacttaaagctttactatataatttcgcaagcgcgatttgtccatttaacggaataccaccatttccgttactatcaggatccgctccaaatgcaaatggtacgttcggatgatacactttcccagtagctggctgactatttacttttttaccatctacgtaaatagccacttcgcttccgttatacgttcctgttaaatgatacgttttgttcgcttctaattgaactccaacacgtttatagctacctccaatgtgagcccataattcaacatatccacttcctgtagactcaaatccaattccgccgctctctgtattttgcaagatgccttgtccgcgaatttcattcattgaaaatacagtttctaacgtaaacgtatttgctactttttctttttgtgctgctgaaaatggaaggtatccaaatgtatttgcttttccgtttaacttcataacattcttcttcaatgctttatcatattcaatagtcacattgcccttcacatcaccttttgtaccaaatggtgaattgtctttaaatgtaccatctgcaaagtttacatcgaaaacatcagcttttggtactttcacattcgggtcaatattatcttttttcgtagtaatttccgcagttaacggctgtgcggtttcattgccaaatgaatcaatcgcaactacttcaagtgtatatgctttcccgccatctaaccctgcaagcgtaaacgtaagatctttcggcactggatcacgataaaactctgagaatgctaacaatttattttttatttcacccgtttgcttatctctagcctgcacacggtaagagtgaacaagaaggttgtccaatgcttgcgggaatgttactgttgccgcattttctgttacatttgatacagcaagctttgcatctttagcaaagtaaggcttttctttatcacgatcttctacatgtgtaaatgtttctttctttgctggtaatttaattttccaaggctcgcctgtccaagaattcgtatggaaatcacggcgattaatcgtcacttcttcttcatctacttctactaataaaccttggcttaacgtactagctcctggcgggatattcccttgtactttaccaccttcaacttccatataacttactgaagatgtaccaactgatgtaaagtctttttgatgtatcgatctcggatcatctaacggataatgtgaatgacctgaaaacgtaataacttgtggatattcttttaacactgcattaatttttgcgctatcttgtgttccccattcctgactaccgtacactgtatctttaatatgttgatgtaaaaatacaaaaatcggtttttctggatcatctttttgtgcttttgccatttcttcttttaaccaattaatttgcttgtccgaataataaccatgtgttgttccattctctggagacataacaaggaagtgataaccttttaccactttatgataataaattgattccatacctgttttttctaagaaacgcttctgtgcaccctctacggataaaccgttccaataatcatggttaccgagagaattcattcgcactgcatctttatttgcattttcattatacacttgcatgaaacgatcatattgctgcactgatcctgtatctgtgaaatcacctacaataacaaacgcatcttgctttggtgctaatgtattaaactgttcaatcgctcttttccagcgaaacgtatcatccgttccactatttttaatatgcacatcacttacaactggaaaaactatcttcttctcacttgatgccttttcttgctttttctcttctgctttaactgatgtgctccatggaaatgatacgaatgctaatacaaaaaccatcaataatccaataaggccttttacttttcgtaaatcagttctgtccacgtaaatcctcctcatataatgaattaattacaatggttattgtatcgaacacatattaacttcgtttaaagtgaaaatgaaatttatttaacttttgtaaatatacagtcatttttctgtaacatccaacattacttgtattatcttatacaagtaccttgtgtctaacagactcttattcattattatgatttggaagcctattaaacaaactttcctgaaatttttcgcccctttattaacacaactatcgttttccaacatttaatagtaataaaaagaaagtatgaagggaggagctactaatggcttgtaaaaaaaatatcggctgttatgcccctttatctatcatctgccctccctatgatccacctaatccaccagaaccaccaggctgtgaattaattacaaatgaatttgccggtaattttcttataacaaaagaaattccaccaccttctgaaaatcctacattaatcttatgggaaggagatggtgtagttaaaatatctggtaccatttctgtgtataatagtactagtagtactgcaggaattaccgttcaaattatcggaaaggtgacaaatacttttacagtctatcctggcaacacaatgtcatatacaggtcaatccttacaatctgtggctatcattgatattccaaataacccaacccgatatatggaaggaaaatattgttgtcaattctcattttgcttataaatttcttcaccaccttaacttacaaactatataaaaaagcataccacttggtatgcttttgcttatgaaattggataacgtactgtcagacataattgtccttggcttactcccgttcctgttgttacaatttgaattgtagtaaagtatcttactgtaaatgatccactgctttgtggttgtacagtaattgtattcaccactgtcgctcctactaaaaaattcaccgtaattggagctgtacctacatcatatttcacataacctgatgcatataaatcttgcgtaatattattcgtatacactgtttcagttaccgcaccagtagcagcccaatctatacatacctgatcttgaacaagtgttttactggaacagcatgataagttagaattgtacatcttagccctctccttttctattatgaaagtggataacgtgtagttatacaaaactccccttgatatgttccagctgttgcagcaggtaaagttacttcaattgttacgaaacgacggtacgtaaaagctatacttgttcctgggtttaatgtttgtgtatcaattgtagcgcctgctgcatctaaaactgtaagtgtgatcggagccggtccgacgtcatatcgaacaaaccctgttccaatcatattttgattaatattattgttgtacagtacattcgtaatagcagtcgccactacagttcctgaccacggactacacactttatcttgcacataatttttatctggacaacaagttaatgctgaccctgagcactcacaagacatagttgtttcccctctctcttttatattccctatatgtgtatgtcccccagagtcttttgcctgtactattcatctattttcaaaaaatattcaaatgactagatagattccgttttgtttctttttttcatatatttatagacaaagatactagcaacaataagaataacgcctcctaatatcggtagcatatattgtccaacaacatccgctgctttttcccaatgtggacctaatttcattccaaaataaacatacaaagtcgttaacgggaacattgctacaaatgtataaatactaaatttccatatgttcatttttgccataccacatggaacagaaataagcgttcgcactccaggtacaaagcgtccaacaaatgctacaactggtccatatttctcaaagaaatcatctgctttttgaatttgttcttctttaataaagaagtattttccgtattttattaatagcggacgaccaccgtaataaccgagtgcatataacgttaaaggtcctgtcgttccaccaagtgtccctgctaatacagccaaccaaaaattcatatctccctcgtatacccaatacccaaccataggcaacactacttctgccggaataaattcaaacgttaatgctaacacaactccaaaataagaaaactgctttaaaaactcgattatatctaaaataatttgctccatatttttaactcctatcctacgtttacgttatgcttttcttgtaattgaactggcgccatttttacaattcggttcaaaataaataacacaactccaatatcatctaaaataccgataaacggtaggaagtctggaattaaatcgagcggcatcgctacatacccaactaaaaaagcaacagataaaattttcttctttattgaaacctcttttgaagtaaaaaagtcaaataggaatggaacaaatcggcgaacatgaaatacaactcttaatctactaataagttttttcatttttatatctcctctctttgtatacgaaaaggaccctaccaaatatggtaagggtcctcaaaaagacagaaaggggcctttaccattgctggtaaaggtctcactaacaacgaaacgttgccaataaagccgagggtttctccctgtaatgacgactttattgtaataagttactcccctttatacacaattttatacactcacattaaaatatttcagagggcttgtcaatatattttatattccaatcccttccgtaaaaacaaaaaacgtataggaaatttcttactatctcataatatacataaccatttttgaacgaagggagatgtttcatttgcataccgtctggaaaggcgcactttcacttggactattaaatataggaattaaactatacagtgccgtagaagaaaacgacataaaatttttaagtctccataaagaatgcttaacacctattaaatataaaaagttcgctcccgattgtacggatgaagaaattgatgataacgatattgtaaaagcctatgaatacgcacctcataaatatattattatggatgaaaaagaattagctcaattacaacaagctcatgaaccacgatccattcgtattatatcttttgtccaaaataacgaaattgattctgttctttatgatcgctcttattttataggacctaccccaggacatgaaaaatcctatttattattaaaagaagctcttgaacgtacaaataaacttgggcttattcatatttctattagaaaaaaacaacatttagctattatccgtaactttgaagatggactaatgttacaaaccatccactaccctaatgaaattcgcgctataacaaatacacctaacttaccaagtaacgaaaattatcctatacaaaaacaagaactcaccgcagcaattaatttaatccaccaccttacaaatccttttgaacaagaaatgtatacagatgaatataaagaagcccttaccgaattaatcgagaataaaattgaacaacaggaaaaaactgaaacaatctctccaactccgaacatcattaatattatggagacattacaggcaagcattgaacaagcaaaaataaaaagagacaataaaacagaaaaagaggccaaataaaattgacctctttttctttaaagcggattacatttcggcatttcaagtccagacgattgagctagttttaataagtagtaacattcctctcttgccatatgatctgccattctagccgataatacacttaatacttcattcgataactcgagctcttccacttcatgtaaaaaatgcgaaaataatttcaattcaagtgaaacatctttcgtaaacttctttaatgctggaaaatgatgaagctccgttcgtaaataccctgtcatttcaactgcctttaagtaaaattgttcaaaatgcttcgtaaattcttcgcttttctcttttaatcttttttcaacaagatctaatccaccagaaatagagcctgcgtgaccagccgcatccgttaaccaaacgagatgataatgtaattcatgaaaaacaggcggaacttcccctttcttcaaaaactctaaaactgctatatactcttccacttcgtttaccatatgattaataaaagttggcgtaaaatgaatcgtaattttcccttccaactgcttctgtataatatttaatttaaacgcccgaatctccttagcggcttgttctgcctcttttgaaaatgccatcagattcacattccgaactttatttaacaaattcgtaaatgtttcaacaaagtaagtagctttttttatatcctctttttccttcggagctaatgcatccagtaaaaattgtgcatgatcagtaagtacttttaaccaaaattgatgctcaaacaacgcactttcttcataatttctctccactaaatcccctccgtctattcatccttctctatcacttgaagtttatatccatccgggtcttgtaccacaatactcttctcacttttgttttctgtgtatgcgattttataaaatactaacctcttctttacattctctatgttagaaattgaaaacgttagaacatcaactgagtccgtaacactcttctcacgcccgcccaaactgcgcttcataataaaactaattctcgttgagtcagcatcataccaaacccctgttacatctaattgaggtctttctaaactaggtttaattcctaaaatcccttcgtaaaaatacaaagtttcctttaagtttttcacttccaatacaatgaattgtttcacattctccacattcattccccccgtacctattacttttttatatgtgtcataaatgcctattatgtctgaatacaatacgtagtaatgaacacttaaggaggtttattcgtgaataaatatatgagatcattcgtgccctatcatagtcctctcgatccctgtcctcctattggaaaaaaatattattctactcctcctaatttatttttaggctttcaaccgccaaacttaccacaattcacaccaaaagaagcactacaaaaagggactttatggcctgttttttatgactattatgaaaatccttataaaaaagggcggtgactactgtcgtgaatcaatcgctaccagaagaatactataaacttttactggagcttcaagaactggactttgtactagttgaactcactctttatttagatacacatccagatgacaccgctgcgattaatcaatttaatgacttttcctataaacggagagtattaaaacaaaagatggaagaaaaatacggaccactccaacagtttggaaacagctattctaatgccccttgggaatggagcaaaggtccttggccatggcaaatataaaggagagaaactatgtggatttatgaaaagaaattacaatacccagttaaagtgggaacttgcaatcccgcacttgcaaaattattaatcgagcaatacggtggtgcagatggagaattagctgctgcactacgttacttaaatcaacgttatacaattcctgataaagtcattggcctacttactgatattggtacagaagaatttgctcaccttgaaatgattgctacgatggtttataagctgacgaaagatgcgacccctgaacaaatgaaagctgctggtcttgaccctcattacgctgatcatgacagtgctcttcattaccataacgctgctggtgttccatttactgcaacctatatacaggctaaaggtgatccaattgccgatctatacgaggatattgcagctgaagaaaaagcacgagcaacatatcaatggctcattaacttatccgatgatccagatataaatgatagtctacgcttcttacgtgaacgtgaaatcgttcattcacaacgtttccgagaagcggttgaaattttaaaagaagaacgcgatagaaaaatatatttttaatacacgtatcctagcgatatgtgtttttttacgttaaaagttaaatccttcctattaaacatataaatagtatatttattcgatttaatgcattattttttaatattttcaaaattccctattgctttctagtcatcagacctttaaaataataacagttactcgacaaattatttgaattttcgacaaaaacactcattaggaggattttctttatatgcatacaactttaaaaccagcgcaaatactttcgattagtttattactattcgcagttttcttcggtgctggtaatatgattttcccgccccttctcggtctttcttccggagaaaatatgtgggtttccattacagggtttattattacagacgtcggtttatctttacttgctatcgttgctgttgcccttgctggtggtagttttaacactttagcgagccgtgttcatccaaaattcgcagcagtattcgctatcattatttatctttcaatcggcccactatttgttattccacgaactggatctgtatcttatgaaattgggattgcaccacttttcccagatcaatggtattctatgttagtttttagtgcgattttctttacagtcgtttacttcttatcattaaatccatccaagctagtagatcatataggtaaaatattaacgccaattttacttgtaattattgcaattatggcaacaaaagcgattctttcaccaggaacgtttgcagaacctatcggtgactataaagacatcccgtttttcaaaggatttcttgaaggatttttaacgttagatgcaattggcgctctcgtactatcaacaattgttgtaaatgcaattcgtcaaaacggtatacaagagaagaaatctatcgcaaaatatacaatcatttgcggaagtatcgctgctctattcttaacaattgtttatttcttactcggttatatcggagcttcaaacggaaacttagggcaattcgaaaacggtggtcaactattagctactgttatgtatcaattctttgggacaagcggtaatgttttattaagtatcgccattatcttcgcttgtttaacaacggcaattggtgttgtaagtgcatttgcaaattacttcacaacagtgctaacaaatatttcatacaaaaagcttgtgctatacgtttgtatctttagtttcgttatttcaaacttaggattaagcttattaattaaaatcacactacctgtattaattattttgtacccaattacaatcattttaattttcgtatcatttatcgataaatatacgaaacgtaaaccttctgtctacatcggagcgatgatcgcagcattcattattagctgtattcatgcacttgataatgtggaaatgataccagattttatcgctaatatcgtacacaccattcctttttataacttaggaattggctggatcattccagcaataatcggtggtataattggatactttattccgcaaacagaagctgcaggtgaagtttctacaaaataaagaaaagaagcaagcatgaaatccatgcttgcttcttctttctcttcacatcgtatgtttaaaagtaaataactcttcttttgactgcaaagcagattgttcctcttctacatctttcctctttctctcccctcctaaccttactttcaacattgcctcttctatacttttcacaatcatatttcctgaaaaaatagttagtccgaaaaatgtaattgggactagaggaatccatggatgcactgttaatgatctaaagtatactccaattaaacctgaccattcatgcgtataagattccacctcttttataggtccaccaaacgtaacagtcccaccaaagaacacttcaagtaatcctaagtgcagtaaaatagtaagactctgcgtaaactgttgaagaaatacgagtataaaagtcatatagagatgcggaaaaagatgttttataacaatacgtcttctcgatccgcctaatatgcgcgcggcatcaacaaattcttccgttcgcaatttacgaacttccttcgcaacatacagtgcaataactggcattacaagcagtacaagtaataccacttgaaacgaagccctttcaaaaaaggttgtggtctcctctccgcttccaaatgcatttgcagattgaagaaaaaaatacgcaatcataactgttggaataactgtaaaactatcaaagaaagcctcaatttttgaaaatcctctttttatatacgttccgagtacgacaccgaaaaacacacctattaccattctaagtgccgcaattaaaatagatataccaatcgtccacttcgcgccttcaatgactaaatgtaacaggtcataccctttccggtctgtcccgagtaaaaattgtaatgaaggtggaaacggtggcacttgtggattttcatccacatcatattgcaatgtaacttgtctaatatgtccatcattccataacgtatttccgatgctcaaaagaactaataggagaagaaacccaatgcttatccaaaatcttttatcacgttttatatacgtccacatattataatctctccttcatcgcagccggaatgagataatgaaacaatttaaataaaataaaaatcggaatatatataagaagcacactaacgatgaaaacctcaactctaataccgaaatacgatttcaaaaacataaaaataccacccgtattaaaaatccattctataatatataaattagataacataaaaaagatattcgttttcgcaaagaataatgtactaagcaacacatttcgtaaaatatgacgatttaaaatatgaaaacgccccagccctttcgccttagcaaatagtacataatctttttctagttcattttcaaaacgaagcacgaccatttttacaaacataatcgtagtcgggatgctcaaacacaatattggcaaccctctaatcgactcgcctccaattgaagcaatttgaaaaggtaaaaaacctgtttgtttaaaaaaccatacaactaaaatttgtgatactaaaataagaaggatatctggaatggattctaggaagatgagaaatgatttaattcgatgttgtatacgcggtgaactactcataattacataaacaatacaaaatgctacaaataatgaaataaaaaaagcagctaaaaaaataataatcgtttctttataatggacgaacagctgcggaaataaaaatttacctctcacatattgcaaattggaaatatccattaagttcacaaacacttcttttaaactctgtatgtactttgatacatccagcttaaatccataaaacaatttcggcagagcccctaaaataataatccccaaaatcgaaataagaaattgaatcgtcacttccatcccattcaaaaatacctttttgaccattttcacccttctctctctataatttaccccctaattttattcttaattttctgaattgtaaatattttaaagacaaaaaatcactaagctatgatcctagtgattctttatgcgcatgcctttctcttttcgcaaacggcatatataaaataaaacacccaataagcgctgcgagttctaatgaaataatatagtaaggatgcggtcctaacatatcgagtaatgaagctgtttctggcttatgagctaaaaacatataattaccacctgttttgtaattcacaaacgaaacaagcggaatcaatatgtttaaaaatatcatcgtacgcttaatagattgcaaggtcggtctatagccttccacccaagtcataaagagtggtgcccaaataagcaatacatgcgcgataaaatattcaatgaaacgaaaatgcggaaaagcatattgcaaatttggtgttaaaatggcttgtgatgcaccaataattcccgtaaaaaatacaatctcatatatacggtaacttttcgttacaatcataatcgacgctaacaacaaactaattgtacataactcaaacggtaatgaagtagctagctcaaaaatccccgctttccactcccacatatgaagcccaatttcactacctataaataaaaatgcaatcgcatatcgaaccgttatattccactcattttgacgtaataaatcttggtattgatacagaaaaaatatccccaccaacataataaataatataatggcatgttgccttgagtatggaataaacggttttaatggatgcgtactaaaataagcttccatcttccttcctcctctccttcatacaatattattgtaagaaagaaacaacgagtcaattcatttgcttacaataggacaacctctaccttacatttacatattcataccttacaaaactgtaaggttattgtaagctaaaacgatttgtcagattcttcacctcttctatacttaatgtagatactaaaacgaacgaaaaggtgataaatagatgaaaaagaaaaataaggtgttaattactagtgtagtagcaatcggaattgcagctggatcatactttgcatttgctggtggcggttcagaagtagcaatggcatatagcggatataaagtaactgaaaaacaaatccaaaacgcgcaaaaatttggtggcgaagttattccaaatggaattgaaactatttcatttgatccaacaaaaggaacatatgaattagctgttaaaaaaggcgatgaagtgaaaaagggtcagcttctatttaaatacaatgatccgactgcgaaacaaggtgtaacagaagcagaaatgcaaaagaaaatcgcacaaaaagaagtaacgttgttccaaaaacaaattgatgcggcgaaacaaaaattacaaaaagataaaaatgcaggccttcccgctgaagcattaaaagcatcagaagctgaagttgggcaattagaatcacaacttgaaatgaaaaagtttgaagttgaaaaagctgatgaaatgattaaagcagcaaaagagaaagtaaacactctttctgtaacaagtcctgctgatggcgtaattgatgatattgtgaaaactgctgacgaaaaaacaggtatgagcggggttactcttcgtcacgctggtcaatttaaggtaaaaggtcaactttctgaatatgagcttgctagtatgaaagttgggcaagaagtaactgtttcatcaaaaactgtcgctggtaagacttggacaggaaaagtaacagaaatcggttctacaccattaaagagcatggatgaaaataaaactgtttctaactatcaattcactgtcacattagataatagtgacgaattacaaaacggcttccacgtttacgtaacaagtaaatctggcgaagcaactggtacaattgttccgaaaagcagtatcgtgaaaaaaggtgacaaaaatgttgtcttcgttgtaaaagacggtaaggcgaaagaacaagcagttactgttgaattcgagactgatagcgaagcaaaagtttctggagtgaaaaaaggagaggaaattatctctaaacctgaaaaagacttaaaagatggtatggaggttgtcgcccagtgattaacttaaaaggcatcacgaaatccttccaaaatggtgcagagtccgttcaaatattacacggaattgacgtaacactgaaccaaggagaattcacttctattatgggaccttctggttctggtaaatcaacattaatgaacattatcggttgcttagataaaccgacgacaggtacgtacgaactagccggtcaaaatatttcaaacatgactgaaacagaacttgcacacgtacgtaataaagagatcggattcgtattccaaaacttcatgttattaccgagacttacagcgcttcaaaatgtagaactacctcttatttacgctggagtcgataaaaaagaaagacgcgagcgctcattagctgctttaacaaaagtcggtttagctgatcgcgctactcacttaccgaacgaattatcaggtggacaaaagcagcgtgtcgctgttgcacgtgcaatcgtaaataacccaaaattcattttagccgatgaaccgacgggagcacttgatacgaaaacaagcacacaaattatggacctcttttacgaattaaataaacaaggctcaacaatcattatgattacccatgaccgtgaaatcggggaagctgcagcacgtcaaattgtaattcgtgacggaaatatcgtccaagattggagaggttaattttgaatacgagtgaaaatatacgcatggccctttcctctatctttgctcataaaatgcgttctattttaacgatgttaggtattattatcggtattagtgccattattactatcatttcaatgggtgatggtacaaacgcaaagtttaaaaaagaattaggccaaggaaaagataacgaagtaacgatttactacaacaatcctgattacggaacagatagtgccaaaatcacacctgatatgctaaaccgtctgcaaactgtaccaggcgttaaagatgtgtatccagacgtaagtatgaaagtaaaagcatctgctggttcaaaagatgtaaatcttgatttaaaaggtggaacaggcgcctttatgacagattcgaaaataaaattagttcacggtcgtgaattaaatgacagtgaattaaaccaagcaatccctgctgttatattaaatgaagaagctttcaacaaattatttagtagtggttgggaatcaaatcaatacacagatataaaaggaaagccgtataaaatagttggtgtatacgaaacgaaaaacgactttggaatgcctatgcctgaaggttatacatcacttgaaaatgcgcctgtcatttcaggagtaaatgagtatgactctgtaagattaacaatgacctctccgacagaacgtaaaagtgtagaaaaacaagccgtttctgtcttaaacgaaatgaaagctcctaaatttgagcacaaattcgaagcacaagacttaggtgaatttacgaaacaactagacgaatcaatcggtatgatgaaaatggtatttggtggtattgctgctatctccttacttgttggtggtatcggtgtaatgaacatcatgctcgtatctgtaacagaacgtacacgtgagattggtattcgtaaagcacttggtgcaacacgtggtaaagtattaacacaattcttaatcgaatcttgtattttaacaggacttggtggtttcatcggattcatgctcggtattttcttcgcttggatcgtctcaatctttgctggatggccactcgttgtctcaaaagaacttggacttcttgcagtaggtatctccatgttaatcggtattatattcggtttactaccagctaacaaagctgccaaactggatccaattgaatgtttacgatatgaataaacaaaaacgtaggagtttacactcctacgttttttatttatctactgaattgagtttcttctattatatatgtttcacgttacaactatcatcctaatactcttcattatttataggtactaaggctattatctaattctattattgcaaaaatactatgtaacagacgaaaatcaaggcgtaattttttccatacttcgactgattttgtaacaattataccgatattttattaaatttcacctcatttatatattttcacgcctaaaaagattatcgttttataactaattttccattcaaacagtaaaatatgctactttcgtaacgctatagatatcacctagaaatattactgtaatattattaacgttacagtaattgaaatactactcattttgtgtttcatatgccctgatacgccaaaaaacaacaaggaagcgctatcaggatatttatggaattgttacagaatattaatgccccgttacgaaagctttgtaattttatgtttttcgcaaataagaaaataatggttgctataatgaggtcaacgaaaacaaatgcaatggaggctattatgaaaaaatttatgggtatagcaacagcagcggtttttggtcttgggattttcacaacatctgctaaagcagaaacaatcgtaacgactgacgtactaaacgtacgagaaaacccaactactgaatcaaaagttgtaggaaaattattagatggatataaagtaaatgttttacatacagaaaatggttggtcaaaagttcaattgaatagcggtaaagaagctttcataagcgctgactatacaaaagacacttactacgtaacagcaaacgtattaaacgtacgtgctggagcaaacacagactcagagattcttggtaagttgaaaaaagatgatgtaattgaaacaacacaccaagtacagaatgattggattcaatttgaatataacggaaaaacagcttatgttcatgttccttacttaacaggtaaagcaccagttaaagttcaaccagtagttaaagttgaaaaaacgactaatgttcaagatacagctaaagttcgtgaagcagttaaagctcaggaagtagctgaaactcaagcaaaagctaaagctcaagaagcaactaaagctcgtgaagcggcagaagctcaagcagaagttaaagctcaggaagcagctaaagctcgtgaagcagctaaggctcaagcagaagctaaagctcaggcagacgctgaagctcaagcagaaactaaagctcaagaagcggctaaagctcgtgaagcagctaaagctcaggaagcagctgaagctcaagcagcggctaaagctcaagaagcagctaaggctcaagcagaagctaaagctcaggcagatgctgaagctcgtgaagcagctaaagctcaagaggcagcagctgaagctcgtaaagcagctaaggctcaagaggcagctgatcgtgaagcggctaataaagttcaaaaaccagctacacaacaacctgttgcaaaagaaactgagaaaaacacacaatcttcttctcgtgagttccaagttgtagcaacagcttacacagcagatccacttgaaaatggttataaagcaggcgaccaagtaaaatcagctttaggtcataacttaacagctaatccaaacatgaaacttattgcagttgatccaagtgtaattccattaggttcaaaagtatgggttgaaggttacggagtagcaatcgctggtgatactggtggagctattaaaggtaataaaatcgacgttttaatgccagataaaggtacatcaagtagctggggacgtaaaacagttacagttaaagtattaaactagttagtaaaaaagagtcagtctcatccttgaggctggctcttttttatgattcttacattctttctttctcttgaaagtaagtaatgttatctcgaagccacttcctctccgacataaacaagtttccacgttttttgtacactttatcaaatatctttaaaacttcttcatgattagcaaacttatgtaagaaacgaagagcaatgataatctctgcttcatccgtaggctctacttcatttttacgtcttctagcaacaattttattcacacgttcgcaaattggtctcattgccatttcgtcgccatacgtataaatagctcgaacagcttcatatttcaccatcacatttctatcctgtaaagcttcaatataaactatttgtaagtccgatccccctatttttgctaacacctcaataacagttgaacgaacataggcactattactatataaaagctttgttaacggcagaatcgattgatttgttccaatctcaagcaaggtataacaaatatttgtaatctcatctttattttcttgagtatccagcaactttagtaaagcactctccgcttctaatgatttacataactttaaggaagaaactgcccaaaaacgaacactatcgtttttatggtaaatatacggaataattttatttgtatcacttacttctggcaatgtataaatattactaagcagttcacttaacaaagtcgggttttgttcacattccaaacaatctataagataatcagcaatactgatctctttcgtattaatagcaagtttcgtcattacataatacatatctttcttcattgctattttttttgctttggttaccttctgctgtaaataaggaaacgttaataggtcatctagctcttttgcttcatcataagcacgatgcctaacctctgtatcttcatgagccatcccccttaataaaccatctatatactcttccatctccttcgctcccgtcaaaatcaaatctatctctttgcattctatatacgatagactactatttcaacataaaaaagaggatgccacagcatcctctccttctcttctctattccacacaagtaaactgcgtccaagctcctacataatctagtaagaataactcctcttccgcaattgtaccgacgatatttttccgttcatctatcggcatttctttcagaatgatttgcagttcacctttatacttaccaaatgaattgtttccaattacaacttgccctctttcctgcagcacactttcacgcactgggaagtcataatctttgtactttttacgtacttctgtagaacgtatcatatactctgttatgtcgccgcgtcttacgtgtaattcttgcagcgtggctctcttttctacttcagtcacttcgcctacaaagtgcacttttagctgtaacatgtagcgatttaagtttcctagtttttctaactcttcctcactcgcataagcatttccgataatgacatcatcgattagccctgttgcccataaatgcttcgcttgtacttcaattggtaaattacgatgctcttctaacgtacataatccgtcgttaatatcccatggaccgatgtttgcagcatgtgatgtaataaaggctgccgtacgaataccgtgttttttaaagcgttcactacagcgaatgaaataatcatacggaagaccagtgaatttttgcggataaaaattatggcaaccaattaaagctgatttattcgcttgatgcgaaagaatattttctaagtacgcaatatcgttacttacatttaactcaatttttaaaccgtacggattattcgtcattttcgcttcagttaacccgtcgaagcctacatctaaacgaataccgtctgcgcctaactccgcgaagaatgataaatcgctataactaataccaagctgatcaaacacagccggagctacatctaaaataacttccatattgttatcttttgcgtgattgataatctctttaaattcagctacaatttcttctttcggacgattcacagataacaaacaagtaaatattcttgaaaaaccgtgtcgtgccgctgcggaaatataagccatatctttttctttcgttgaatgttctgggtaaagtgaaattcctaatttacgctccatgcttttgcatctccttcatacgttgtattaatgccatgctcgtaaatctatattttgcagataaacacgttgcacataaaattgtcggtacaataattacgtacggtgattgcaatcctaacattacatatgcacccattgaacaaccgataaataaaactgatactagtagtaacactaataaagatttactttgtacccatttcgaataatgggcaatacactgtccgaccacgaatgtaattaagatgataattgctccgagcattctgttttctcctctcctgctaattgttgtttctcatacattttgaagaatggatagtaaataacgaacgagataacaaagttaacaagtacaagtaccccagccataattgtccagtccgtactaatcaccgctgcaattggtgctaacatcgtaaatggcagtttcgccatcatgagtggaatcatacctgaaacaactgcgaaatatgatactgtcgttgtcactaacggtgtaataacgaacggaataattaagattgggttcattacaattggtgcaccgaaaataattggttcgttaatattgaataaacctggtacgaatgataatctacctaactcttttaggaacttagatttagagaacataaacataattactaaagctaacgttgagcctgatccgccaatccatacgaaccattgaatgaattgctctgtaaataagtttggtaactgatgtgcatttcctgtagccgtgaacacttccatattttcaagaattgctgaatcccacatcggacgaataattggtcctaaaatcgctggtccatgtataccgaatgaccagaaaaacacgattaagaatactgttaataaaccaccgaataaattatttcctactaatactgattttaatggtgcgattaaatatgtaattgttgtatttacatcgaatttcaaaccgtagcgaatgccccagaataaaagaataactgctaacgttggaattaatgctgcaaacgaatttgaaactgctggtggtacactatctggtaatttaatcgagatattatgcttaatcataaaatgataaatttctactgcaattaatgctgtaacaattgcgccgaataaagacgttgcacttaatgttcctactgaaatatatctccctgcatcaataacacctggtacagctttcgtaatttgaattggttcaactgatgctagtaaaaaggcgagtacagataataaccctgcacttaactgattgagctgataaaagttcgcgagcgaagcccctacaccaaacgctgcgtataatgccattagtcctactgtaaatcggaatggaatatctaaaatatggcgaaacggtgcaatccattccatatatgcatcaattggtaaatttaaaaagataacgaaaaatgatccgacgatcgttaacggtaatgtagaaataaccccgtttcgaattgctaataaatgtcgttgtcctgcaatcttttgcgttgttggcataatcttttgttccataaaactcataaacccattcatcaatagccctcctctttctctctactataaaagaatgaaataaactttataacattataatgtttatatttaaaaagatataattatgctaaaactaattgttctgcttgcttaagcactttcaaaccatcacacataccataatctcgttggtctataatcgcaactggtatattgtatgaatttgcaagaaactctacagctggaaataaatatttcacttgtggaccgattaaaacgacatctgcttcctttatttcaagtttcacaagttctgaatcaaccgccttaattttataattcttcccctgtttctttgcctcttcttgcatttttcttacgaccatactcgttgacatacctgctgcacaacataataaaatgtacatcttatacggtcactttctcttctactcgtttatgaagagcaataaattcttcagccagttctttcactgtaattgcattcattaaatgatcttgtgcgtgcactaacagtaaactaatttctgcatgatttcctcttgcctcttcttgaattaaatccgtttgaatacggtgtgctgctgaaatttcctcactagcaagtttcatcttttcaccggcattcccgaaatctccttgtcttgcaaaagcaattgcttcaagcgccgcgcttctcgcattgccaccatgtaaaattaacgcaaatggagtttgcatatcagccattttaaattcccccaagctatatgttttctatatttttatcttattatgaaaacgcatacaattaaacataaaaaacttccgttatgtaacggaagtttttatatactttttcaaaatgataataaaatttcttgaaaatcttcaattacctcggtctgagtaagtttctctatcgtagtttgactagacataatatcatataaaaaatcataaagcctttgcaaatcttcattattattgcgctttacactaaataaaataattacttgtacttttttatctccccaatcaacagccttttcaagtgtgcaaaacatcagaaaagtttcctcacttaataactgcatcggatgcgggattgcaactgaattcccaaccgctgtcggagacgtattttctctttccataacagaagcataaaagttttctggtacatagcgtttctcagcagctttctcacataaaaactgaataacatcctctttcgtagaagcattatgatttaaaaagattaaatcttccttaatataaggctgcacactagtattcacatgcgtaaacaaccgctgaccaatcgatttaatctctttttcatcaaatattgaattcacttttataactggaacaggcaaaccactcggtatatgaatcgtactaataatacaatctattttttctttataaagatcttctactttcaattgataatagcctgtaatacctacaatctctaatttatctcggaactgtgataaaattttatattttaatagttgtgcacttccttgaccagtcgcacaaactaataagcatcttttcttttgattttgctcctgcaaacggctcatcgctccgccgaagtgaattgcaatataaccaatttcactttcagggatcgattcacccgtatattcaccaatgatatctccaacgagaaccgcaatttcaaaagcatacggataattctttttcacttctgccaaaagaggatttctcgtatttagcttatacttcaaacgatttaataacgtttttaaatgaataccaaatccaaataataattcttcatcataataaaaaataagattccgttcttccgctactttaaaaagaatatgttgcataaatgcatatatatctttccctaatagctcttctacattttcatagcgatctctcgttgtaacagcagtacttaataaatgcatcgtcacatataatacttcttcttctggaaatgaaaatttcaactctttctctaaatctcctaaaatctgcttcgcaattgtatattctttctttagtataagttctgattgctccgcatgcattccttttatataatgttgactttgacaacgctttaatgcgattgcaatatgaatgactaaattatcaatttctatatcagataaatatattgttccgccttcaatatactttaatataattgaacgaatgagtgatatatgaggtagcgataaatatgtctccgtctgctcaaattgctcatgaaacggagtatgatcataacgcggtaaaccatattgtgataaacaagaacgaatattaaattcctctccaacaatacgtataccataatacggtctcttctcaatttgtaattcatagcaaccacatatatctgtaacatctttcataattaaattgaccgttgatttgctcacatacatctcttccgctaattctgaaagcttcacatatccctctgtcattaaaacacgctgcagaatgtacgctattctttcttcataagaagttgggatcttttccgtctgtttttgaaatagactcacacaaaagttttcaaatttcttcttttgtataatttctaattcgtacccattccctctttgcgattcgattttcgctccattttcttccaatatatcatttaataattttatatccttttgaatcgtcttcgttgatacatgtaaacggcctgctaaaaaagctcgatttaacatcgatttctcttctaaaaattcctctaaaatagaaattaatcgctgatgcacctttgtcatagctcttcctctcgctctttatatataaagggggaaaagctgctgaaatcagtagtttttcccctttatattctctctatttctttaatgtaaatccgaatttatcccatgcttgtaaatagtctagtaagaaaatctcttcttctacaattcgaccaactacatttgtttttcctgtattcaccatatcttttaatgcaatttgtaattcgcctttatactggccatattgttcattatcaattaataaatctccacgcttaatttcgcgcgtattatgaggtttaaattcttcttttttatatttcacacgactttgtgtagaacgaatcatatattcagatacatctccgcgataaaaatgtggttcgtctaatacgataattctttctagttctgtcgttgtatcatatatttctatatcaaatgtttgtttctctttatttaatgcacctagtgcttgtaattcttcttctgacgcatatgcgtttgcaataataacatcatcaattaattcagtcgcgaataaatgcttcgcctgtgttgtcatcggtaattcacgatgctgctctaatgtacataacccttctgttactggccaaggtccgtatgttgcatcaaatgatgaaataaaagctgccgttctcataccgtaatctttaaattgtttcgagcatttaatgaaatgatcgtatgataatcctgaataacgatgcggataaaaattatgacaaccaattaaattttcacgatttggtctatgactcataatgttatctacatacttcgtaccattgctcatattaatctcaattttcaaaccatacggattataagtcataattgattcttctaatcctgagaaaccaacatctaaacgaataccgtacgcacctaattcatggaagaatgataaatcattatacgaaatacctaattgttcaaaaacagatggactaatatcaactaatacttggaaccctaatgcattcgcatgagagatcgtttctttaaattcttctataattttctctttttctccatccacagataataaacatgtgaacacacgtgtaaatccatatttacttgctaatgttaaatactccttatctttctctactgttgaatgttctggataaatagaaatacctaatcgtctcatatgtacacgcctctttcttcatcatattgtaaaccttttcaaatatatgtagtgaaaaagtatatatccccttcttgttcactactcttttgaatccgctttctttaaagaaaaaacaatttctatcattcttaacacctacaagtctatacatctatactttacatctttttttcatagttgtgtagcttttacacaaatttgtcagtttttcatcttaaaaattgttatccgttttcaagacaccttccttgactgttgcattggccaatacatatactcgaaagaaaagagaaaactttatataggggatgaatatatgggagaagcaatactcgtaaaacgagaaccgttatggacgaaagagtttgttgctttaatttttgcaaacttatgtatgtttttagggtttcaaatgttaattccaaccttacctgtttatgtgaaagaaattggtggcacaagttccaatatcggatttgttgtcggcatgtttaccgttgcggcactttttgttagaccgctaactgggaacgccttgcaaaaattcaataaaaaaatcattttaatgatcggcactgctatctgtttactcgctatgggcagttaccttttcgcctcaactatctttctcttgcttgctgttcgtattttacacggagctggtttcggtattacaacgactacatatggaactgtcgtttctgatttaattccctcagctcgccgcggagaaggcatgggatattttggcctttctggaacaattgcaatggccctcggtccacttatcggactatggcttatgcaaacatataacttcacaattctttttttatgtgcattatcgtgcacaattgtttcattaatattaacgaaactacttcaaatccaaaaatcgaaacagcctccacaacaatcatctagtacttttctcgatggatttattgagcgtaaagctttacttccttcattattaatattatgtattacattaatgtacggaggaatcggaagttttatcactctatttgctacagaagtcggcatagctgatattagtctcttctttttatgtaacgcactagcaatcgctgtaactcgtccattctctggaaagctatatgatgcgaaaggccatacattcgtcatcattccgggagttattataacttttacaggcattattttattgtcgtatacgacgacaattccgagcttaattattgctgcagcatgttacggaagtggttttggagcgatccaacctgcactacaagcatggatgattgaccgcgtagcaccgcatcgacgcggcgtagcaacggctacattcttctccgcatttgaccttggaatcggcgctggagcgattatatttggatttattgctcattttacaaactatgcaactgtatatcgttactcctctctattacttattgcttttctcttcatttacattacaagcataagaaaacaaaagcatggcgataaaaacacggaaaaagctgctggataattcagtggcttttttatcgtgttaaaagaattatttcccctcgttttgctgttataaaactacatgcattttcctacatatttttttaacattcatcaaaaaatatacgatgaactcgcagacgctttccttaatattcgactgaacaatattattctaaaaagtgtgatttctttacaaaattaagatttatacaagataaaaaccaataaaacacagctgtttctttaagggattgtaaacttttcttctctttgtaaatttagtgtaaattttactagcaaaccgtttacagtgcctcaaggttcagttaataattacatcgtacatgaaatttaaggagtggaatgcgtggaatataatgttcaagatatgatcttccagttcattggtggattaggtattttcttattcgggattaaatacatgggcgatggactgcaacaagcagctggagatcgtcttcgcgatattctagatcgttttacaacaaatccacttatgggtgtactagcaggtatgttagttactgtattaatccaatccagttcaggaacaactgctttaacagtcggacttgtaagtgccggatttatgacattaagacaagcaatcggtgttattatgggtgcaaacatcggtacgacagttactgcatttattatcggaattaaaatcggagaatatgctctcccagttatggcaattggagcaatcttactattcttctttaaaaataaaaaagtacattctgtaggtcaagttgtattcggttttggtatgttattcttcggtttagaattaatgagcgcaggtatgaaacctcttcgttctttagaatcattccaagaattaacagttagcatgagtgataatccaattttaggaattgttgttggtacagtctttactttaattgtacaaagttcaagtgcaactattggtattttacaagaactattcggtcaaggggcaatcgatttacaagcagctcttcctgtattattcggtgataacatcggtacaacaattacagctgtattagcagcaatcggtacttctattgccgcaagacgtgcagcattagttcacgttatctttaatattatcggtacaattatctttacaattttattagtaccatttacaagtttaattcaatatttccaaacatcattaaacttgaatccagaaatgactattgcatttgcacacggaacatttaacgtaacaaatacaatcattcaattcccgttcattgcagtgttagcatggatcgtaacaaaaattattcgtggtgaagatgcagcgattgacttcaaaccacaacatttaaatccaatctttattgaacaatctccagccatcgctttaactgaagctcaaaaagagattatccgtatggctgagttctcattacatggattaaaagaagcaaatcaatttttaaatacacaagacaaaaaacacgcaaacatggctactcaattagaaggagctattaacaatttagataaaaaaattaccgagtatttagttttactatcagaaaagccactttcacctacggattctgaaaaacattctgttttagcaggtgttgttggagatattgaacgtgtcggtgatcatgtagaaaaccttgtagaacttgtagatttccaaatttcaaaccgtgtttcactatcagatgaagcattagctgaattaaacgaaatgcttgagttaacaatttcaacactgcaagactcagttgaagctttaacaaacttcgatactgaactagctcaaactgttattgcaaaagaacgcaaaatcgaccaaatggaacgtgttcttcgtaaacgtcacgtattacgtctaaacgaacgcagctgttcaggtgatgcaagtatcatcttcgtcgatatggtaagtaacttagagcgcattggcgatcacgctgtaaatatcgctgacggtgttttaggtgaacaaggaaaaatcaatttaaaacaatcattataataagaaagagacgctaacgtaagcgtctcttttttcattatattttaacaactgttcttccttttaactttccttgcaatataagtgtaaacttcttctctaattcttctaatgtacattcttctatataagacagtaactctttatttccccattcattcgctaaaagcgtccaaacatctcttctcacatctactggacattgcacggaatctacccctaaaaggcttatgccccgtaaaataaacggatataccgttgtttgtagttcctgacctgccacattaccgcatgtcgttacacaaccaccatactttactgtttttaaagctgtttctaacatacgtccacctacagtatcaataactccggcgtatatcccttttaacatcggtcttcttgattcatcattcaattccgcgcgatgaatcacttttttcgctcctagacgtagtagcatatctttctcttccatttttcctgtcgctcctactacgttaaaccctaacttacttaatatactaacagctacactccctacgccgcctgtagcacccgttactaaaacatctcccatattaggcttgattcctgctccaataagcttatataccgacaaagccgcagtaaaacctgctgtcccatacatcatactttcctttaatgacattccttctggtaaaggcacgacccaagatgatggcacgcgaatatattctccgaaaccaccagaggtattcatacctaagtcatatcccgttacaataacttgatctcctaccttaaaagagttatcttcactactcacaacttctcctgcagcatcaattcccggcgtatgaggatatgttctcgtaacacctttattaccagtagctgaaagagcatctttataatttaatgaagaataatgaacttgtatgattacgtctccctcaggtaaactacttacttctctctcaacaactttacttacaaactgatgattttccgtttcattcacaacgattgctcggaataatgtatgattcattatgctctctcctttatccgtcaaattcttccttattatatagaaaaaataagtaagcttactcatttcttcttggctatatttcaacaaatcttacttccctatcactttctcataatatatattttcatttctactaaaagcccttatacttattctacatctgacaaataatatatagaaaatctgactttttataaataaattgaatttttacgaaatgtaaatgatttgtaatgttttttttcgctaaatttcattataataagtggatatgagtgtcgtatttcaatccaaatgaaggagtacaggaaatggagcaaaacccatctttgcaagaaaatacacgcagtaacccgaaaaaaaataagaaaaaaataaaagttattataagcgctatactattcgttttattaataggcggcggttatacttggtttttagtaaataaagcatcttctgctgttcgaaatgccgcacacgatttagcacgcggtgataaatctgatttacgtgataaagctgttaaacctattacgaacaatgtctctgttttaataatgggtgttgatgaaagcgatgtccgaggaaaagaatatggtgacgctataagaacagatgcgcttttacttgcaacttttaataaagatagcaaaactgttaaactattaagtatcccacgtgacacatatacttatattccaatagaaaagaaaaaagataaaattacacacgctcatgcattcggttctgctaaaaacggaaaaaatggtggaccacaagcaagcattgatgcagttgaaaaattaatgaatgttcctgtcgattattttgtaaaattcaactttaaatcatttataaaaatcgtcgatgacttgggcggtgttgaagttgatgtaccagttgaatttactgagcaagatagcaatgataatgcagaggcaattcacctagaaaaaggtgttcaaaagttaaatggcgaagaagctcttgctcttgctagaacaagacacatcgatagtgatgcaatgcgtggacaacgtcaacaactcgttatcgaagctattttaaagaaactaacaagtgttggttctgtaacaaaagttggcaacatcattgatgatattaacggacaattcgttacaaacttaacatttgatgatatgctttcattctataaatatggatcggattcggaaattgagaaattacaaatccaaggtgatgattgctatatggcaaaaggtgacgatacttgtagcaaatctgctggtggtggtcgaacttactactacaatccagataaaaaagaattagctaatgttacaaatgaacttcgtactcatcttgggctacctgcatatacaaagtctgactcaaactctgattcgaaaaagacaaaagaatctaagtctgaaaattcaagtgaacgcgaatcaaataacaatgaagtgaaaaataagaacaaaaatagcagtgaagatacagaaacatcgtctaatgacaatgaataatatagaagcggttctctatggaggtagagaaccgcttctttttattcttccaaatataaaaatcagaactttctaactatcttttttaatatttttaaattataataaatagtagcaatctattccaattatcagggggctcatacatatgaaagctgcagtaaaacataacatctcagattttaaagactacttaaaatctaacgatatatacatggaagaaaatatagatgaaaatgatggctctgttcatttttcagtaggattagagactgaagctggcgcaaagattcaacttatcgctgctttccaaaacgaacatcctacggtggatatatactgcttcaatgttgctcacgtgcctgatgcaacatcaacaaatgatattttacatgtcatcaatgaattaaatacatcttatcgctttgcaaaattcacattaaataagcaaaatgcaattgatatttcaacatctcttgcattctcagaaccaaactttaatccagcacttgtctttgaacatacgagaatgctatataaattagcaaatgacgaatataaaaacttaatgaaagttatttgggcataaagtaaaactataatccgttaggtttacgggcaataaataaaaggatgggctgtaagcagcaccatccttttattttgatatcatatcgatccacattttaacagcagtgcctacaattaaagtggacaatacatattgcagtactttttgatttagcctcttcccgactcgtgctccaagtggcgcagcaaatatactggcaaccgcaataattagagctggaatgataactacttgcccagtaaccatttttcctgtagtaatccctattgaggaaataaacgtaatagcgatagatgttgcgatcgtcatgcgcagtggtaattttaaaataactagcataatgggaactaaaaggaacgaacctccagctcctataatgcctgaagctccccctacaacgaacgctaacaagcttgctaaccatttattatacttcacatctccactattattttgtttcggtacaaacatcataatagctgcaattgtagctaatgctgcataaacaacattgactgtatgttcctctaatatgttagcaccgaaactccctatgaagcttcctattaatatactagctcccatatacataactaacgttttattcatgtcattacttttccggtatgcccaagcgcctgcaaaagttgcaaagaatacttgtaccgctgtaataccgctcacttcatgtgatgtatagccagaaaatcctagcaataccggaatgtataagatcatcggataattaataatcgcaccgccaattccaaccattcctgatataaacgatcctataaatccaattataaaaagtaatacgactaagctcatcttacatcccctcccttctagaaagaagatgaattaaatgaataagtttacattcccatccgaagcatctgctaaataagctcctactcctgcaaactctaccccttccataatctcttcctcttttaaccctaataaatctactgtcatttgacaagcgacaagtttaatcccctgttctttcgccaaatcgattaaatctggtaaaggcatcgcattatgttttttcataatacctttaatcatctttggtcccatacctgcaaaattcatttttgataatcccatcttatccgcaccgcgtggcatcatttttccaaacactttttctataaaagttttctttaccttcacatgctcatctttccttaaagcatttaatccccaaaaagtatgaaaaatagttacctcttgatcatacgccgctgcaccatttgcaataatataagcagccattgctttatcataatctccgctaaataaaacgattgttgttttcttctgttgttccatgttgttctccctccgattacctataggggtattttatcatttataaaaaggctcaaatcatgtatccctgtactatacgactttaccttcccatgctaacataccacctaccatattaattgcttgaaaaccgtagctctctaaaaactgaactgctcgtgcacttcttccgccagaacgacaaacgataatatactccttctttttatccaactcatgcatacgaaactctaatagtcctagtggaatattacacgcttctggaattttcccttcggctacttcttctacttcacgtacgtccacgatatttactgcttctttacgtaacaatttttcttctaattcttttgctgtcatttctttcattttaaagtccctcctcacaaagcattcataccacctgaaacgtttattacttgctgaaaccctagttttttcaacatctttgcagcttgcttacttctcattccactttggcaaataacgattacttccatatttttatctaactgacctgctctactagctaactcatttaacgggatattctgaaatcctttcatatgatttcctctatattcacctactgtacgaacatcgataagttgtttcccctttttttccactatattctttaatttttttccgctgatattttgcacacctttcactggtaaaaagcgcgaaataacaaaccatgtagcaagtaccatgaaaagcgtacttaatattgtgttcatataactccccctctacatttataaaattatttctttactacgccttcttaatccaaaatttcagcacatcagcttcttctacatgctttacgatttcatgaccacctttatttgcccacgctggaatatccttaactgatcctttatccgttacatgcacttctaacacttctccagtttgcaaagtatccatcgctttcttcgttcttacaatcggcattggacatgctaaacctttcgcatctaatacttgttttatattcatcatcaattcctccaatttgttatttttataatgactcatgcactgcacaacgatttgggccaatctccatttcacgctcttcttccacactcggatgaattttccccatattcgtttgacgaatttcttcatatgcatttggctgaggtggtaagttttctgttacaactttacggaactctccctcatcctcaatatttaatcctgcattatgctcaaataaatcttttaattttgcactaacgataccactttcgttcatttcacttatttttgaataatgagccggtaacacaactaaattttgagatagctctttatatcggctatacaaagtattacgtaaatcactcacccaatcttcagccttaccagcaagatcaggacgcccaattgaatctacaaataaaatatcgcctgataataaataagaatcatctacaatgaatgacgtacttccaatcgtatgccctggtgagtataatgcgtcaattacaattttagtaccccccaccgtaataacagatccttcaacaagcggttcgtatgagaaaacaacttcctctgcatcttttggtggtaaccaatacgtaccacctaccttttccgctaacttacgtcctccggaaatatggtctgcatgtaaatgtgtatccattacattcgtaatcgtaacgccatgctctttcgcaaattcttcatatgcttcaactgttcttactgcatcaataactgctgcttcaccatttgaaacgaccatataagataaacagccttttccaaggcggttaaactgatacatacttccaccattttttaaatctccaacttttataggctttacatattcactccaagccttcatgccaccagctaaataataaatattttctaatccagcctctgttaattgctctgccacaaatatagaagacccttcttttgcacatactactaaaacatctttatctttaggtaattcacttacaatatgatctacaccatctaacaagtcaaagtaaggtctattaatagaagaaacttgtttcccttcaattttccaatcttcataatccgcctcattacgaacatctaaaatgaataactctccgaataacactttctctgccacatcttttgcttgtaacggtttaacactcactctattacccccataggtatatttttattcaaaaaaatttatttctctatattcccttgccactctaacatacctggaatgacatttttcacatttgaataacctttctctttcaacatttggcaagctatatcactgcgattaccagttcggcaaataacataaatttgcttcgtcttatctaatactgcgctgtttaattcacctaatggtactgaaatggcggatggaatatgaccaaaagcaaattccgctgcttcgcgaacatctaatacaatgctctcttctccatgagacaatatagactgtaattctgcattcgtaattgtatgtggatatttcacaatttcattcacttcatgctcgtttgctttcctaacataatgcaccaatacattatcctcgtgtttcgtcccgatatattgatgtcctactttacccgcccaactttttatatctaccgtagatcctttatctgttgcctgaacttcaattacttgccctggtgctaatccttctatctccttcttcgttttcacaatcggcatcggacaagccaaccctttacaatctaaactcatatccacttttatactcataattgattcctccacaacttatatacatatacctgtatgggtatattaaaatgtttttgaaaatctgtcaacaattatgtctgacagattatcggctttttacaagtaattgaacagcttctttaattaactcttcatttgaagcattaccgctttcaaactgctcacgcaaacattgctctaaatttgtcccaacaacaagtccaattgtacgatcaagtgcagaacgagatgccgttaactgtgtaataacctctcggcaatcttttccttcttccatcatacgaagtacaccacgaacttgaccttcaatacgtttcaatctatttttcatatcttgattatattccattctataatcacctcattaccattatgtcactatttataacctatgacaatatattataccctatagggtattttgtaaacccctatttttaatatttatcttatatgttcacaaaacaagaagtgaaaccttactatataggctttcatcttccaccaaattttgaagtggaagatgaaaaaatattaatatacaacacgttctggtactactgttccgtataatttaaagccaccatctaagttctttaccttatatcctttttccattaacatgcgcgctgcaacataccctctcataccaagttggcaagtgatatatatttctttgtccattggcacttcatccaatcgatcacgtaattcatctaacggaatattaatagagtctttaatcattccctgttttagttcattaggctctcgaacatcaataagatatccaccatttttaacaatgtgatctatttcatgccattgcactgtgtccacaaaaccatctactatattacttgccgcataccccaccatgtttactgggtcttttgcagaagaatagggcggggcatatgataattctaaatccggcaaatcgattacagttaagtttgccttcattgccgttgcaataacatcaatacgcttatctacaccatcacgccctaacgcctgcgctccataaatttttccgctttctttattaaaaattaattttattagcacaggcgtagcattcggataatatcccgcatgagaatttgcctgtacatgtactacctcatagggtatatttagtcgttttaatattttctcattcactccagtcgaagcaactgttaaatcaaaaactttagccacagaagttcccatcgtacctttatataaagaatccgtatgaccatgaataatatctgctaacatgcgaccttgacgattagctggccacgctaaaggaatcatcgtttctatttctgtaacaaaatctttcacttcaatcgcatcaccaattgcatatacatatgggtcagatgtttgaaatttctcatttacctttatcgttcctctaactcccaatgctaatcctgcctctttcgctaaactactctctggttgtacaccaattgctaaaataatcatatctgtttttataactgagccactttttaaacgtacaatagccccgtcttcttctaacgcatctacaccatcttctaaaacaagctcaacattgtgatttctcatatgttcatgtacgtatgctgccatttcataatcgattggtggcattacttgattcgccatctctacaagagtaacatcaatcccgcgttctcttaaattctcaaccatttccactccaataaatcctccaccaataaccgtcgcatgacgtggtttcttctcatcaatatacgcttttatacgatctgtatcaggtacatttcgtaacgtaaacaacgccttcgcttcttcaatgcccggaataggtggaacaattggtttcgcccctggtgaaagaatcaaaacatcatattcctcgttatatgtttcatctgtagttacattctttatcgtaattgttttctcttctttattaatctttacaacttcactcaatacacgtatctctaaattaaaacgttttgacatcctttcaacagtttgtactaataacttttgtctttctgtaatgacaccgccaatataatatggcaatccacagtttgcgaacgaaatgtattcaccgcgttcaaccataataatttcatcttcctcacttaaacgacgaagccttgcagctactgatgccccgccagcaactccgcctactacaacaatttttctagacatatttcaaacctccatgttatttattatttaatttcctcatgcattaaacaaaaacctatacctgtatgggtatatgatagagtataaaaaatttaatttcaatcagtatgtctttctttcacaaatttgaaacaaataaaaaagaacttagatacctccaagttcttttgcgtatagttctataactttctgcacgattaaaccaatgtataaatacgtgttttgaaaatttaaatacacctgtatttaaattttcaaaatcaatagcttcttcacataaggttaaatccattccacgtaaaattctttaatgccacaacctgagaaaacgaatcccaatggactctttttctacaatgatatatttatttttttcgttgcatctctatcattaatcataaccatctgcgtctcgttatttggcaaaaatacgatatattttccctttctcacattcctccaaataacttttccttcttcgtctgttttccctattgagatcccaatttctttactgggttcaggtgattcgtctttcataagtataatttcaaaatcttttattggctgtttttctttatttttcacgtgaaaagttacagaattaacaaccttactaaacttcttttcattatttactatataactagtcattacgattatgaccaatacacaaaataaaatccataaaagcttattatatttattcagaccattttttaagattattaaaaacatcgtctgtcacccggtttccagaattccaagaattacttcctactgtatgggtagctattattgttacacccgtacgagaatagtcatgatatacaggtgctccactttgacatccataagtgtccatcctatatgttaaaattctaggactagtgccttcaattggtccataatctgtccacatagtatatttttcatttcctactttatcacatggataccctggaactactgcgagtaatccctttggagactctacattagtagttctatatcctaaccaacctgtataatctccaggagatccatttaatttaatggctccataatcaaattccgaatctccatcatcagtccatccacttactgaataaagctttgtccaactataaggcaaatacggtgcttggtctccatttctaccaggagtcacaataacattttttgcccatccaccaagctttttattgtaaacacagtgcccagctgtaaatactgtatctttactaattagcgctcctgtacacccataaacctcttgtccattaaattgaattactaagtgtactatagccctataaggatacaaagttgtattagtaactctaattcgatcatctcttcctattacagaatgtgtaaggatattagatggataattaaaattactgtctcttaataagtatccccaatcttccccaccatgtttacgcccttcaaatgaaggtgaaacaagatcttctccccttcgatcattactatacaaagattgttcttgaaaaagtacacgttctccctcatttgaaactgatgtccacggtacatcttctgcatacaccttctgattcaccaaaaatactgtacaaaaaaagataaaaagaacaccaaaactataaagagccaacctacatcttatagaaataaagctatccaacataacttacctcctatacaaatgatagcgaacaattgaagatccctttataaattctagtttttctttttttagaagtcaatgtaattaataatgattatcattattaattacattgacttaacaaaatcaaacaatgagtcatattctttactctgcgttcaaaaatctgtctcattaaagtttcaccctattacataaatccataacctttttcacaatcaactccgcagtattctctcccggtggcattaacaaatttgtaactgttccatacacaataggacttaattctacttcatatccgccatatgcatattcgtcttttgtcggtaaataaccaagatatccgttcatatatccaccaaagaaagccaattcattttgaaggctctctttcattgctaaggcagtttctgaaaaaggttccatcggtatacctgaaaacataccatcattaacttgaaacagttgaacttctaaatctatacgtaacttccgaataccttgcctatatttctctaatacgatagcaagccattcatccgtattcacgccccactgcttctcggctaatcgagccatgcttcgtatctcatcaatttcaggaatatccttcaacttcatttgcatcatacttgaaactgtccttaattttacaattggactatatgtaactgttggtaacatcgttaatacatgtccactaagtatgtaagccatttgttttaacgcttcccttgaaccgcgatatttcgcattcacatttccagcggcaccttgaacgataataataggacagttcactaacttctctagaatctctctcgtcattccaggataatccgttgataattcatcactatcaccttttaaaacattcggatgcgcagtacaaaacactaaaaccccagataactccttcgtttcagcatctcttattgctaacatgccaattcgtttatcgacaacaccatctatatttgttcccatctttgcttttccatcagatgttctctctcgtcggtttacaccgatatcacctgtcgtaacaccccatccaacttcgcatcgctttaaattgttatttgcagtaacagcaccatgtactacattatttactaaaatcattttatacgactgcactagcggatcatcaccgactgtctctggaccggaatgcgtatgagtataaacaaccgttattcgctcaaatggcacatgaaggctacttgctactcgctcacgaatcatattcgtatcttctactaacatcccaatattatcgatacttataaacacagttttcatttcatctttttcaaatacaaaaactgtcccataaatacgctcttcaatattatttattcctgtctctctatgatatccgacaaaatcaatacctacaggcggcgtaatatcaaccttacatacccctattttgctcatttaaatcactccatttctctatataactcccttttttcaagaatagcatatttaacttggttccaaataaaaagaacggacacagtatcctatgtccgttcttcccctcacacatacttccgatgcaccatcttcccatcataagaaaacacaacacccttactctccacaatcgactccatatgcaccgttcttccccacagctgatgaagatatggtaatactttttctaaatattttaaatcgagctcaattccttcgtaactatgtttaatgtacaattctccgttctttaagtagtctccatcttctactactaaatacgggaatccaccatttgtacgcatatttacgagctgatcacgtacatgttcccactctttatctattactttatattcttttccctggcgctggaataagtacatatcttctctcattacgagatctttgtttaagtagtttcttaaaaacgatacatcccattcgatttcgcgtacttcaaagattttgtcacggccagatcctggttttacgcctcgtcgtttcatttcttcagtcggattgttgtaccgttcttcaatatcttcaaagattttaataccgaggtagtatggattaatacttgtttttgatggctgaacgacacctgcatttagtttcgcaaattcaattgcttcatcagaggttaagtccatttcacgaagtatgcgttgatgccagtaggatgcccagccttcgttcatgattttcgtttcaagctgcggccaaaaatataacatttcttcgcgcatcatcgttaatatatcacgctgccaatcttctaactcacggctatattcttcaataaagagaagtaaatccttctctggttgcggtgggattttcttctttttacgtatattagagcgctcttgttttttatttcggttatctaaattccataaatcatcgtattgcgatacctttttcttttctacttcttcctcttctaaatcatcaatactccatgcgagcttcggacgcataagcgacggatcaatatgctcttgaatggcaagtacggcatctaaaaatgtttctacctctgcttttccatacttatgctcataagctttcacacggtccgctgttgcggccatactctctaccatatctcgcttcgtatttgaaaaacgaatattatttttgaagaagtcacagtgtgctaaaacgtgcgctacaattaatttgttttgaattaaagagttcgtatctaataaaaaggcgtaacatggatcagagttaataacgagttcgtatattttactaagtcctaaatcgtattgtaatttcattctgaaaaattgttttccaaaactccaatgtgaaaaccttgtcggcatcccatatgcaccaaatgtataaataatttccgctggacatatttcataacgcatcggataaaaatcaagcccaaatccagtcgcaatttccgtaatttccgcaatcgcatattgcagtgctttatcgtcacttgctctcattattttccctccttacactttcccttaagaaagtgtatgatgaagaacaagctttcatgaggattgattgcataataaaaagacacccccgcaaaaacgagaatgtctcatctattaaccttcaataatctccatcttctccgtaatcggagtacgtgcttttccttctggcgctttatcgaaatagccgatatgaagaattccaacgatacgttggcctcttgttaaaccgattccttctataaataatggattgtagtttaatccgcctgatttccaaacgcaacctaatccgcgttcccaagcaagaagttggaagttttgcatgaatgcacatgttgcagcataatcttcatcacgttgaatttgacgcggatcttcatttatatatacaacgatttgtgcaggcgtgcttaaaaaacgatctgataaaattttaccgcgtttcgctctttcttcttccgtaaaagagtttaatactgcatctactaatttcttgcggccttctccgatgtatagtttacaattccatggttcacggtgcttatgatttggtgcccatgttgcatcgtttaatagttcaattaataaatctttttctactgctttgtctgtaaatgtacgaacagagcgtctttctttaatcacattagcgatggaagtatatgtagtcatatttatctctcccttatttttatctatatgtataagtttatcgtcatcattgatattgattttcaatttcgattataccttagttttttactattaatcaatgttttatgttggaaaacttctaaaaacgtcatttcatactgtgaataaaaaaacttgatttgttcacaagtatttcacattttatggaaatgatatatgtacagttttctacattatccatctaggaggagtttacatgtacaaaaaaatcgctgtttgtatgactatggcagcattattatgcgggatatccaccttccctacatccgctgccacaccaaaagaagtaacaatgcatcaccataaaccaattccagaagaagaaatgcaatcgctagaaaaactcggctataacaaacatgaaatttggaaagctgctcatattgcaagaattagtaataaagaaataaaagatgttttagcttactataagcaaaataaatcttgggagaaaacagccgagcatttcggtgtagatccaagtaagctgaaaaagcatcatatgaataaagaaacaaagcaagcactgctacaacagttagcaactatgcaaaaatccacacctgatcagctaaagcaaaaaatgaaagaatataacatcaaattgcgtcatcttactgtgttaacaatcatctctcaaaaaagcaatacccctcttgatgatgtattaaaaatgaaaaaagatggaatggacattaaacaaattgccgaaaaattaaatgtaaaaagagaagatatacgagcggaaatgatgaaattagtgaagtctattaaagaacaaaaaacaaattaaaatgctaaaaaggaagaggctttcactaaaatgtaccctatagaatagacacttgaaaaaagtctattctatagggtatttcttgtataataaaaggaaaattgtatgttttgctgatgcatcgaaagcaaagcgtgaattaggctgggaggcaacacgcggattagaagaaatgtgtgcagattcttggaggtggcagtctgaaaataagactggatatcaaaaagttagtaactagagaattggttataggttgctaaaactttcattgagttatcaatatagtttggcttaaaaattgaattacatgtataatgtattttatattttgtagttataataatttgatagcggtacctgaagaaagaaggttaaaagcatgaaaaagaaaatcctattttggatattaggaattataggagtactaattataggtggaggagcttacgcttataatatatattcttctgtttcaaaaacattagatgaagttcataaaccattaaaacgcgatcaaggtaataaaccagaagaaaaaatcaataaatctgaacctgtttcaattttactattaggtgcagatgagcgtggtggagataaaggacgttcagattctttaatggtcattacattaaaccctaaaaataattcaatgaaaacagtaagtattcctcgtgatacgtatactgaaatcgttggaaagggtaaaagtgataaaatcaaccatgcgtacgcatttggtggcgtagacatgtctgtagcgacagtagaaaaattcttaaatgttcctatcaattactatattgaagtaaacatggaaggatttaaagatattgtagatgcagtaggcggtgtcgatgttaataatgatttagaattctccctagaagggaaacacttccagaaagggaatattcacttaacaggtgaccaagctctagcatatacacgtatgcgcaaagaagacccacgaggcgacttcggtcgtcaaatgcgtcaacgtcaagtgatgcaagctgttattaagaaaggtgcaaccttctcttctttaacaagctatggcgatgtgttaacagcaattcaaaagaacgtgaaaacaaacttaacgcaagatcaaatgtttgatatgcaaaagaactataaagattgcttgaagaacagtgaagaaattcaaatcccaggtgacggccacaaagccgctgatggtatttggtactactatgttccggatgcagcaaaacaagatttaacgaataagttaagagcacatcttgaagtgactaaataatatgtaataacccaactcctttggaaggagttgggtttatttttgcatggatttatattagtattatatattgtgagattaatagatgaggtgaatcgatgaataagaaagcggtacttgtccttgttatttttgtattgtttgttgcttcgattgtgagcggtaaattgtactggaataagaagattgcgaatgcaacgggacaaacgagtgaagtaacgaaaacaaaggctgaagtgaaagatagcggagcgaagaaagaagagaaaaaggaagagaaaaaacaagatgcgaagtcatcttttaacgaagcatacgcgaagaacttgccagatgcagtgaaagagaagttaaagaaagctgctgaggataaaaaggcagtaaatcttgttatcgttggtgatgaaggttcttcatctgaaaaaggtgcttgggcagctaagttaacagctaatttagaaacggcttacggtaagggtttatggaatgtgactgtaaaggaatataagggtgaaagcacagaagagttaatcgcgaataagcgtgataaagagatcgcgaaagacaatccagatgtgattttatttgaaccaccatttattaccgataacggtaaaactggtaatgggaactctgttgtgaatacacagaagtttgttcaagcactttctactagtgcaaaaggcgctacgattatgattcaaccatcgaatccagtgtatggtgcgaaaaattatccgaaatcgattgaagcattaaaacaatttgcaacgcaaaataattatacatatattgatcattggggagcatggccggatgcatcgacaaaggctatcctaccatacttaaaagaagaatttggtttcccaactgctaaaggtcatgaagtttgggcacaatatgtaacggattattttgtagctaaataataaaaggggagagggtatcgtcgacaaaatatgttcgacaataccctctctttttttataggatttttgctatactaaactgtactataatacgtggtggaaggaggagaatgatgaaaatacttgtggtggatgatgaatcgagtattcgtaatttgattcggatgcagttggagatggaaggttatgaagtattggcagcggctgatgggagagaagctttagagagatggaatgaagggccggatgtattgattttggatgttatgcttccggatacggatgggtatgagttgcttcgtttgttccgtgagagggatagggatattccggtgctgatgttaacggcaaagagtcagatgaatgataagttgcttggcttgcagcttggtgctgatgattatgtgacgaagccgtttaattatgcggagcttattcttcgggttaagaatatggcgcggcgtgtaaagaagacggaggcggctgtaagtcatgaagtaattgaggctggagagatagtgatttgtcctaaggaaagaaaggtacatgtgagtggacaagagattcagttaacgtaccgagagtttaatttatgtcagttatttgtttcaaatccgcagcgtgtgtttatgagggatgagttgcttgagaaagtatggggatttgagtatatcggaaatacgagagcagttgatattatggtgcagagacttcgaaagaagcttgggacgagcggggaatatattaagacaatttatggcgttggctataaactggattgttaagtggtgatggtatgtctttaaagcgaaatatggtgtttggaatagttgggctgttaattccgatttttgttcttttatatgcagttgtttatattacgttagaaaagaatatgtatcataacgcagcagattctttagaaaagttaagtgtagaagcacaaatttatacgatgaattatttagagaaggaagcagaagtggatacgcttggtccgaattcacttttaattgcgtcgtatttagcgaagcgtatggatgtccgtgtgcagatgatcgggaagaatggcgatgttgttgcagatacacaaaaaggagcattgcttcaccgtaacatcgacattgagagttctttgaaggggaagaagtcttacgtttttgaggaggcggatccagctcctattcttttgttttcaagcccggtttattatggaaacgatgtcattggaagtattcgttttataaatgagttaacgggtgagaaggaagttttaacaaatgtgagctggactttcttaatgacatctctttgtttagtagctacgggtattttctttgcgattcgtttggcgaagtctcttcataaaccaattgatcagttgagacaaatggcacagcggctcgcgaatggtgattataagagtaagattgagttaaatgagtatgtggaaatcgctcagctttcagcatcttttaatgcgatggccgatggaattgagctgcatattaagcagttgcaggaggagaaagaaaagcagaaagattttctagaccgcattacgcatgagctaaaaacaccgctaacggcaattatcggttatgtggatttaattccgaagttacaatcgaaagaagatgtacaggaaagtcttcgttatgtggcggtggaaagtgagcgtttattatcacttgtagaggaactgcttaagtcttcgaaatatgggacgagtacgtttgaagtgtctcctacagttgtgaatataaaggaattggcagaagaagcagtttcaattgtgaaacctcgtctaaatcagtttgaaattgaagtggtaaatgagttaacggatgtacatgttgttgcggattttgataagacgaagcaaattttcttaaatgtgcttgataatgcaattaagtatagtgatgcttcgcacattcgtatgaatgtaattgtaaatgagcatgaggcgaaggtttttgttcatgatgatgggatcggtatagatgaagtggtgcttgcagagtggaatgagtctccgaaaggaaaggcacttccttctagttacgggaatggttatggtttgtatatttgtcaggagattatgaataagcagggcggaagcatgcggattgagagtagtgaagaaataggtactacaatattcattacatttttgcttccgagaaggatggaagacataaaaaacttgaaagcggttaaatgatacatttatgaaacaattatgcggtattttcgaaacaacgtttttttatcttggaggtaggcagaaatgaaaaggctatcatttcaaattcttatgtttgtcatttgtatgattgtttctcttgttttgttttatgttatggagaagcaaatctataatcgaatcaacattgtaaatgataaacaagccgttttacaaagggtgaatgaatctcttccaattgaagtgaaagtaagacatgaaaagtggggagaaatcgttgtaacggatgaagttcgtttgcatacgattgtttcattctttgaccgaattcgaatagagccaggggacgttaagagccaagaacaagtatttactggagaagtaacgtacttgaatggacataagcgtacttttgcagtaggtgacttgttccagtatggggaaaatgtatacggaaagaatggcatggatccgatgatttcagcacttcaaacgtatttattaagcctgtattacacgccagagcgtattagtgatttctttgcttcagcaaaggatgtcgtagtacgtcaaggcgatgtggtacgtactatcaatcttacgcacatacttgattctatttggtacgcaaagcaaattacagattacggagaaattcagaagttattacaatcgcagaatgaaccgattgcttatattacagcttataaaacaggtaagcgcgtaaaaaatgatcgtgaagatattcttacgatttctgtgtatccatcgtactttgttgtgcaatatctcggtgataataacggaaatgtcatgtatatgaaaggctctctagcagagttattcgtaaaggagaatgcgtcatgagaaagatagcctttttcttctttttgctagtaattggaggagcgatgtctagttgctctcgagatacaacctctattaaatatagtaaaaatggtctccctattttggatgatcgtcatattgttgcgtatgtagcggctcgtgaggaagttggtgaagcgttactttcatcattttgtaagccgcgcggatgtacgtatgaatttattcgtctttcaacagaagaacttcttcgtagagtggaagaagaagctggaaatccgaaggcggatattattattggcggtacagtagatgcgcatcaaatgatgaagcaaaaaaatctttctattcctgtgataagccaacatgcaaatcgtatttcaaaaactgttaaagataaagatggttattggtacggttatgaagtggagaagctggcaattgcgattaataaagagcggtggaacgaggaaatagcgccgctcggtctctcgtatccgttaagatggaaagatttattgaatccagtatataaaggaaagattgtcatgcccgatccaaatgtttcaggtacagcatatacgtttttccaatcactgattgatacgttaggtgaagaggaagcgaagggatatgtgaagaatctggcagaacaagttggagaagtaacagtgaatggttacatcccagcagaacttgttgcgagcggtgaatatatgataggcatcaactttatgggagatcagagaatgcttcaaaaacaaggctttccgattttaagtaacgaacctgagcaaacagggttatccgttaatgcgatttcgaaactaaaacgtgcaccgagtggtattattgcggatttatttattgattattgtttatcagaagaagcggggcatattttagaaaaagtgtcgtttggcgtaccaacgatgtttgcgaagaatgagaaagaaatagaaggacagccggttagaaggacgaaccaaaatatatcaaatagcggaataatcgagatatggaatagacagcgtctctctctgaagtgagaaaaggagacgaaaatatatgtttaaatggctcaagccagcacctgcaattgaaagattgccagcggatatgatcgaccgtgtatatcgattactacgtattcgtgtgttaatcggaatttcagttggatatgctgcttattatttagttcgtagtaactttacgttatcaagtacgtatttagtacaagaatatggttttagtacagctgaaattggtctactaggctcagtaatggcaattgtttatggatttagtaagttctttatgggtaatttatcagataaagctttcgcccagcgctttattgcagtcggtttattcttatcagggcttgtaaatatttgtttcggctttgcatcatcctttgggatgattgttacattacttgttgttaacggtattgtacaaggtatgggagcaccaccttgtagtattgttatgacgaaatggttctcgaagaaagaacgtggtacgaaaacaggcctttggaatatttcacataacgttggtggaatgcttgtaccaccacttgtcggaattggtgtaggtattttcggtgaaaatcattggcaaggcggcgtgtttattttccctgcgattatcgcaatggtaattgcagtacttgtttggatcaatgcgaaggatacaccagaatctgaaggtcttcctccaattgatgagtatcgtaatgactatgaaaatcttgaaaaagcagataatgctaacaagatgtcaccaaaagaaattttaatgaagtatgtagtgaaaaataaatttgtatggttcttatgtattgcgaatgcttttgtttatttaattcgtttcggtgttattaactgggttccactttatttaacgacagttaaaggattttcaaaagcagaagcgcatgcggcatatgcaatctttgaaggtatggcaattccaagttcattaatcgttggttttttaagtgataaattatttaaaggaaaacgtatgccattatgtattattagtatggttggagttgttattggtacgtttatatattggcaagcaactagcgtacttgttgtaagtattgcagtttctattatcggttgtttaatttatgtaccacagttcttaatcggtttaagtgcgatggaattagtaccgaaatttgcagtaggtacgacagttggtatgtgtggtctattcggttacgtaggcggaagtcttgtagctaacgcagcaattggtgttattgttgatagttctggctgggatggttgtttcatcttactattaacaggagcggttttatcaacaatcttcttatttattgttcaacgtggacatgagagaaaagatcctaaagtagcgtaatattttgtttgaaaagctatccaattattattttggatggctttttctatataatataaactttccttaaatctatcttaaaagatataatgtcatatttctaatcattggaatttttgttacaatataaatggatgtgtaaaactttgtaaaaacaatgtaataatatgtaatctattttcagaaagttttatacaatttttatattaaactattaagttataaaaaggagagagaatatgttaccaaatacggttcgtactccaaacaagaagaagaaatggattattattggggttattgcactaattgttattgtagcggcaattaatatttttgttatgcaaggtaagaagaagggtgcatcaacaacgtctgatgctgtaagttttgagaaagtgacagaacgtaagctgaataatacgaagttaatttctggtcaggtgaagcctggtaatattgaaagtttctatgcagatccggccaaaggaaaagtgaaagatattgaggtaaaagaagggcaagaggtagaaaaaggtacgaagttattctcttatgacaatgaagagattaatcttcaaatgaagcaagctgagcttgatcagaagatggcggatatgcgttacgatcaagggaaaaagaagattgattcattgaagaaagaaattaagaaggcgaaagatagcggagctgggaaagaagtaacagatccaatggacgagcaagtaaacgagttagagataggacaaaaaacaattgaccttgagaaagaaaaaggaaagttgcagaaagaagagttaagtaagaagcagaaagaacttacgatttatagcaattttgctggtgttgttcaaaagttagataaagatgcggcacaaagttcatctcaagcgctaggcggtcaaggaaaagcgtttttacaagtagcttctaaagatccattccaagttcaaggtacgttaactgagcttcagaagtcacaaattcaaaaagatcaaacattcactgtaactgcgaaagcaaataataagaagaagtggacaggtaagattacagaggtaagtgagttcccaacaagtgcagagatggcgcaagctggcggcatgggtgaagcaactcaaaatatgtctcaatatacatataaagcaagtcttgatagccaagacggtttatctccaggctaccacgtttcattgcaggtaaacttagagaataagaaaatgattgctgtcccaagtaagagcattgtagaaaaaggcgatgatgcatttgtttatgttgaggaaaaaggtaagcttcgtaaacaaaatgtgaaaaaaggttctactgatggagactggacagaggttgtagaaggcgtaacagtggggcaaaaggtggttaaaaatccttccgacgatgtgtatgacggaatggaagtgaaagagaaatgattacgttaaatcatattgctaaaacgtattatcaaggaaaattggcggtgccgattttacatggtattagtttaacgattcagagcggtgagttcgtttcaattatggggccgtctggttctggtaagtcgacgcttatgaatattatcggttgtttagatcgtccaacagaaggcgaatatatgctgaatgacgtgaatatcttaacagcagacgagtcaaagcttgctttaattcgtaatgaatatattggctttgtattccagcattttaatttactacctcgtctttccgcagtggaaaatgttgagcttccgctcgtatatggtggcgtgaagaaagcggagcgtcgcaagcgtgctttggaagcgctaggtaaagttggattggcagatcgcgtgcatcatttaccaaatgagttatcaggtggacagaagcagcgtgtagcgattgcaagagcgattgcgaataacccaacgttcattatggccgatgaaccgactggtgcacttgatacgaagtctggtgagcaagttatgaatattttcacgaagcttaatgcagaaggtacgacgattgttatggttacgcatgaagaggaagtagcagcgtattcttcccgccgcattgtactgcgagacgggaaagttacagaagatagaaggtgtgcggtatgagtttactagatagtataaaaattgccctgtcttctattttagctcataaactgcgttcagctcttacgatgctcggtattattattggggtaggttcgattattactgtcgttgcaattgggcaaggcggggaagctgcattgaaatcgcagtttgttggggcaggtaatcaaacggttccgattcattatagtgcagatataaacgatcctttcggtatgggaatggtagaagcaccgaagataactgaagaagacatttttgaaattaaaaaaattccagagatcgcacatgtggtaacaacaaattccagcatggaaccacttgatattgaagataaaaaagaaatggtaagtattactggattagatagtgagtactttgcagtaaataaagtaaagttgttaaagggacgttctttacaagaatcagatgtggatcagggtaataacgttgtcatgattagtaaacaaatggaagaaaaggtgtttaaggataccaatccagtcggtaaaattattgaaatgaaaggtcaaccgatgcaaattatcggtgtctacaaatcagataatgagtttatgggaatgggaccatcagaagcactagttccaatttcattatggccgacactgtatggaaaagatgaaattcaaaatatttctgttcaagcaaaaaatgtagataatctagaaaaagcaggtaaaaaagctgcagatgttttaaatagtcgtaaaccgaccgatgcaactggtaaatatgaagttatgaatttaaaagaaattcaagaaggtatttcgaagatgactggtattatgacaatgatcatcggtggtatcgctggtatttcattagtcgttggtggaattggtgttatgaacatcatgcttgtatctgtaacggagcgtacacgtgaaattggtgtacgtaaagcacttggagcaacgcgtagtaaaattttattacagtttttaattgaagctgttatgttaacacttctaggtggtttaatcggaattggtcttgggtatggcggagcatatatcgtttctacattcgcaaaatggccaccactcgtttcgtgggaagttgtcgttggaggcgtactgttctcgatgacactcggtattattttcggattaattccagcaaataaagctgcgaaattagatccaattgaagcattgcgttatgagtaattaatagtgtagtagaactacacattaccgttctagtgggcggttcgtagcctctatatgaggaagtgaaccgcccgttagaacgggttatataaatagaaggaggcgttataatggaagcaaatattaatacgcaagatgtaggtgcgaagaagccatcattattaggaatgattacttctccaggtgagcagtttgagagaatgaagaatagtaatgcagtttggggtgcgttttggatactttctttactatcggggattactggtggaattggtgcttatgtatattctttaacacctgaatcaattaagctcaatcaagaattaggggttaatgttacacctgtaatgactttcggtgctggttttgtatttggtgttatcggtatgataataggtttcttcattagtgctgctgtatataaagtgttaatgatgttaatgagcaatgatacttcttacaagaaattattaacaattaatgtatattcaagcattatttcagtacttggtttattaataaatatagttttagcacttattctaggtggttcaggaaaagaactttacactggtttaggcccaatttttgcttcaagtggaggcgctgtaaaaggtattgcaaatagcattgaagtatttacaatttggggatttgttatcacatggttaggtcttcaaattacggccggtttaagtaaaaagaaggcaacgattcttatggttatcttcttcattttaacgatcggctttggtgcactaagaggattggtgcaataatattgatatttcatgtaactagaaagaaatgcagcaattataaaagtaattgctgcatttttgttataaggagaagatacatatatttaagaaacttatagcaaattttttgttcatgttacaagttatattttagctactggtctatatgcgatcgatagatttttcaaaaatataactacagaatagtataacttgagaactcataaacaaaaggttccttctaatgtatagaaggagccttttttatttttacccctatttcaaataccaccaacaaaatttcaaatactagctggtgtaatttcaaattccgtcggtagtatttgaaattactcacggtgaaatcttttgtttatttttatattgtgaaggtaccgcggaatactagaaaggtataccttttagaaacgggtactgtgtgaagccagcgacttttatagagacagttgttttgtatgaagggatgattgtaaatcaaataaagaaattaggtatccgtcaagattatgaagagtattatcaatgtggtttaattggtctttggcatgcgtatgaaagatttgatgcaaagaagggatatttccctgcatatgcacttgtaacggtgcgtggttatatattagaaagattgaagaaagaatctactttgcaagaaagatgtgtatgtgtaggtgagtatgaggatatctttcattttgaagatgttgaaataagagtgaaggattttatgagtgtgttagacgagaaggagaagtatattatttttgaacgtttttttgtagggaagacgatgggagaaatcgctttagagacggaaatgacatattatcaagtaaggtggatgtatcggcaagcaatcgagaaaatgcgcgatagtgtaaaaggataaaaatagcaaatagaatggaaggtgaggaaatactaccttccattctatttgttattaaggtgatgaatcttgcatgttcatttgggataatacatatcccgctttccataattgctgacttagcttatgggaactaatttgtatcgttacggtagctccgtttgaaaaatgaattttagctcgtttagcttttttgaaaaactctattgtatgaacatgtttgaagaaaagccaaatacaatttggagaagcaggagattctgttgggaaagcacaaatatattctctatgattgatcggaattggaacgttttgtttaaatttaaattttgtttttacagcattacgtctcccttgataagtagaatgaatatttgttagacaagatttctgtataagttggagagcagtttgacaggagtaaagatggtttccgctactgtcaataatttttgtacggtaataagggtgtttacatggttcaagcatcattgtagaactagaaataaaaatgttgttttcattatccataattctatatcctcccttataatttacattctgaatataattatatataaattaagtaaattagttgttaatattctatttcatattgtaaattttggctattcgtttacaatcaataggtgatagtctttctaagttgcatcgcttgtacatatatatgaaaatagaaaagagtaggcggtgatatagtatgaagaaaaagtatattattatggctttagttgtcgttctcctagtatatttagcaaacagtaatccgagtaagggcgaatatacagaatgggcagcgaaacagtttatgaagcgtaatgatgtgagtaagaagctagatgaagttcaaaaagagaatgaagagggtctccttggcgatttggcatcggccggtaaaaagttagcgaaaaagtatgttgaaccacaagttgggttattaattgatcattatacgaagcgaaatgattatatattcttctcaacatatacgactgagtttgatataggggaagaacattataagtatgtatgcgtcggtttttcaaaggtttttatcccgattgaaatgccgaagaaaaaagacgaatctgcaaaatgatgcagattcgtctttttcattttatagagtaattggaacttcagatacatttttttctacaaggcgagctcccttttttcttgtattttcatcaatggatgaaaatacagatgaggcaaggattgtatccattacttgatttacgacttgtgcatcgattggtgtgatgggcgtatcgatagaaaaaacgactgtttttccatcttctttcgcgaaaatcaactctagtacttgcatgtgttattccctcctttgtatttatcccgctatttacgggatttgggtctgttggttaaattgcgggctaataatcagcggggatgaataaaatccccactgatccgagttttactttatagtttagaaagatctgatgtgcttacaagttgtacagagtgaagtggtgatgcttgtaaggaagctagagcatgagctacgttgtgtacttgatctaagctcgcatttgttttaacacgtttaaattgtttgctcttgaaaactgttttgccgttcttatctaatccgttgtttaagacaagacgtaaagttaaatccattacgattgtttcaattgccatgtgtatcaccccctttcactttataaatagggcgtgaatgtcatgttttggcgtgaaattttttcttttttttggtacccttaaaagatgaagagaggagaattctggataatgaatcgtaaatggttattttggattcctgtattactatggatggggctgattttctattcttcggcacaaccatataaaaagcaggatatgcgttcagatattgaacaatatgtaaatgttgaatttgtgaaagagcatttttcatgggtatctatcgattatggtggaggaacccctgttagtattgcgaataaaggtgtaggcggatttattgagtttttccttcgtaaaggtgctcattttatggtgttctttatgctaggttcattgatttattacgcttttcatcgatcaggttattcgaggaaaagatgttttatatatgcccttcttttcgttgcgggttatgcaacatttgatgaaattcaccaatggtttacgggagaccgtacaccaatgtggcaagattcattgcttgatacgtgcggcgggttaacggggattataataagtaattggttttggaatagaaaaaagcgctaatctcatttcgagattagcgctttttttgcgggtagtaaaactctacgtgattggcctaattaaagtttcactttatacaccgagtaattcttttagttcgtctgttgatagttcagtcatccaactatcgcttgtgatgactgcattgtttagagattgttttctttctagcatttcatcaattttttcttctaatgttcctgttgtaatgagtttgtgaacatgaacaaatcgtttttgaccaatgcgatatgcgcggtctgttgcttgattttccacagctggattccaccaacgatcgtagtgaatgacatggttggcagcagttaagtttaatcctgttccgccagcttttaaggataagatgaaaatgtcatacgttccgttttggaactcctcaatcatcttgtcgcgatcttttttcggtacactaccgtttaagaagaggacacgctggccgaatttttcttctagcacgcgttttagcatgttccccatgccgatatattgagtgaagatgaggcaactttcattttgatcttttatattttctatgagctccattaacgtttttgttttcatagagcgttcaacgacattttgtggctcttcttcttttaaataaagagctggatgattacaaatttgttttagcttgttcagcataagtaatataaagccgcgtctttcaatgccacttaatccttcgacattttgcagtgtatcttgaacaagttgttcatataaggaagcttgttcaccagtaagaggacagtaagctttttgttcttgtttatctggtaaatttaatgcgactgtttgatctttcttcgttcggcgcagtaaaaatggtgagataaaccgttgaacttgctggatttttccttcatcacgatccttttcaattggtgtgacgaagcggcgttggaattgccctaagcttccgagatatccatgattaataaagtcgaaaatggaccaaagttcagcaaggcgattttccatcggtgtaccagttaaagcgattttgtgatttgcttgcaagtttcgtactgctttcgactgtttcgtatgtgggttcttaatattttgtgcttcatccaaaataacagcatcccagcataatgaagttagttcttcctcatcgagttgagctaatgcataagatgttaatacaacatctgctgattgaaggaaatcttcaaaagaattgcccttatctctattacttccgtaatgtaattgaacacgtaaattcggtgcgaaacgctcaaattctttttgccaatttccaagaacagatgtcggcgctacgattaatgcagggcctgttttgagattgttttcttttatatatagtaagtaagagattgtttgaatacttttcccgagtcccatatcgtcagctagcaatgctccaaatccaagttttcgtaaatataataaccattcaatgccgtgttgttgatacgggcgaagtgttgcgtttagtgaagtagggacatctacttttggaatatctccaatatgaagcagcttttggaatagttcctcataatatccatctagttcgatttcaatatcagtaaacggactatcatcttctacaatttctgtttcagccgtatttgataaatgttgctgcaggacatctttcatctctagtccgtatttatcggcacggttcatgagtttccttacttcttcgataaaggctggatctagtcgcatccattgaccatttatattaaatagacgtttattttgttcaacgagttcgaaaaattcgctttctgataaatcaatgccgttcgtcgaaatgcgccaatcaaaattaacgagcgtattcataccgaagaacgattgtgtttgtgctgtattttgcttcagctggacacgtaatttcggttttgttgcttttaaattttgccaccatgatggtagtaaaattgtaataccggctgcaagtaactcgtcgcttgcttctgttaagaagttccacgcttctgtttcaaagagttcatttcggaacgtatctccttcttttaaccacggtatgagtttactaaaaccttcttgtgtttctgtaatccgttcttcgtaatcgtgccatcttttcggtaaggaatcgatgttttcatatacatatatgcgatgcgccccgcgctttggtgtcacaattgtttcaagcttccacatttcaaattcttcttgtggttcttgtagtcttagtccgattgtaaacggaagatcatcttcaatataaccaattttccgaagccaatcttcttcatgtagtgctgtttccagttgtcttttcgtaaagtcataatgttcatatagtcttttagcatcttcccagccgtcatttgagcggttgtcttgtaatatgctttcatttactgctgctgagaaaagcgatgctaatgtgtcatcttcaattggtgtattttgaactttccaagatggttgtttaggccaatgattcatatctggtacgaaactaccactcgtaaaggcatcccatagttcatttgcatctttcgtaagtgctgtaatcatgccgtttatttgaatatgtgcaaaggaattcatcggtttgtttgcaatgtattcaaaggcttgtgcatttgttagcagcacaccttgttttccttcgaaggttgcttcttttagaaacgtaccgtagaaagaagtggagtgccatgtgaatgcatttcgtttccaacttgttacggataatggagtaccgctgtcatcttctccccaaaggaaccaaccttgactaacatgctggagcctaattgttacttcagtttgattgatcatcgattaattttcctttccgtaattcctcttgtagtgcacgcagacgtgaatggagattggcgatgtgaataatgaaagcatcccattcatcggtgcgttttaatcgtttatataatgtacgtaatttctttaagtaacgaactgcacgtttatatgatttacgatttcgttcttcaatcgcctctacagcagcaagatggtaaagaggaagtgccacttctggcgcttctttttcaatatctttcagtggctctttcaacagttcgattgcctcaaatccatataagagatgaagctctgcccatgtgcgatactgttttttcgcgagtacgtactgttcgtagtttgtgaaactatacggtaatagttcttgtaaaatcatttcaaaaccagcttgttcatttgtatgtgttgcgtatgtttcatacatgattacaaatagccgaacgatatcttttatgaaaatcgtattttcgtgatcttggatcgttttctttacttgtttatacgtaaaggaaagccagttttttgcacgatcccattgcatggcacttaatagttcttctaaccaatagaagtatagactcacaacagaagcaggttgtttctttagtaagtccatcgctagtaaatcttcatcatttaaaaagagaagatgagaagacgctaatgctttggatagtggattgattttcgtatcgattcgtttttcttcctcttgtatgttctctttattgtttaaaagttcactccatatgtgacgataaatgaaaaatcgctcttgcgtataagcgtcggtagagaagaatacttcatgaacgagacgagttgtttcttgcaaaattatttcagactctgaaggaatcgcttctgattgtaagtcccgaacgatggattccactttatctacaaataggcgaatgacattaacaggttggtgataagaatacgttttgtttgcttcgaatgcctgaatttcttctaataatttttgaaagcagtaaattgctgcatgtaacctgaataattcatgtatggcgatgacgcgcggagctttccgctcaagcttcgtatagaaatctgtaaagatactcataagaaaatacatttgtttataagtaaggcgagcttgttcttttttaaatgattcatattctttttcaaaatatgattcccaacttttataatccgtttcttcaaaagctgatgattgcaatacttgtcttgcagttctaataggaggaagggaaggtttcgtattatttttaaataaagttaatacatctcctacttgcccgaaactagacgctgcagatagtaatacagcgagcatatgctcacattgtgttggtgcgaagcaatcacaataactttcagcgacattacgaatcggaatatgaacgctatatacgttgccttccgcatctacagttcctgacagtgtataaccatcaaagtcaacgttgtagacaacaccactacgatataggtgccgagctgtagcgacatgttcctgatcagctgtttgctgtggatctagtccttgaacgaactcattcgcaatcatcataatttcatctttcgtaattgagtgttgcagcataatattcctccgtacacatatttctttcctttaccattataaacaaaaaatgctcaaaacagaaaaaatgaaatttggattacataacttgaaaatcatggtaatatataaaatgttaatttcatatatgaatatatacgtataggaggagaagtaatttgtcagatttacagacgaagttaggtagtggaatgaataagttacaagaaggaatagaacaagggaaaatgaagttgcaagttgcacaagaaattgctcaattgaaaaagggaatgcaagtgcaaatgcagaaaaaagcagaggttctattagaggttgggcagcaagtgtatgttcaattaagaggaagtggagtaaatgaagcgagcttaaaagaaatgattgctccagttcaagaatttgatgtagctatttatcaagcaagaaagcgcattgttgaattgcaaaaacaacaaggtgaaaaagctacatgtgaatgtggtggacctttatcaataaatgataagttttgtggttcgtgtggaaaatctaacccgatgttagcggtagaaaatgaaggtgaaacggtaaattgtatttcatgtaatgagcatatcgataaaaactctacttactgtccagtttgtggaattaagcaaagtggggagtgaattaaatgtattgtcgcacatgtggaaaacaacatggtgaagaagtaaattattgcccaaatgaaggtagtatggagattgcaggagctatagatgcagtaacattagaaaaagatactgcaaaatactgcaaaggttgtggcagtgaaaatgctcaaaaaaatttatattgtcaaaagtgcgggtattctttatctgttgtgaagaaaaaagaacaatctgtaaaattgcctacaatggatggtgctcctaaagttgaatttaaagcagataaagccgtgttacaaaaaggttttattggtggggctgttgcaagtattctcatgttaattgctggttggattggtagtttattatttgcttctatgttaagtgagatgtttagcaaatttgcgaaagaattagaaatgttgccaagtttttattcgagtgcaacttctacgatgttaagttaccatttacttggttttacagctaacgatgatagtggattgatattttctttatcttggcatactccatttacattattattaatcattccatttattattttcgctggtacaggaatttggttagggaaacagcatgttgcgaaaacgattaaagatcaaatctttatggcagcaacagttggtattatttatggcgtctttttattcattataagttttatagcatcacaatcttttgcaattccattctcagaagcaggtaagattacggttggctattcagcgattaagagtttattgagtggtgttgtatgtgggacattatttaccttattaggatttattgctcatacaagcaaaaacaatatggcagtagcatttcaagagttaatgccatatggagcgtctgtgtattacggtgtttcagctatgataaaaggactattagtaacagcgatagcggtttgtattatggcgttagtaagtaaggaagacggtattgaaccattaaaagaaataacaattttaaaatctgaaagtacattattagcattagagttaacacctcaattatggagtatggctcattttgcgccgttagaagtatcaagtccagcacttagtaaagaatttactagaattggtaagaaatcaaatacatatgagagcacgctatcgttttcatttatatcaggcgtctctgtaaatggcgtagagcttagggagatattgatttcaaaaggagcaaatgaggaaagccttgcagaatttgataaagtgaataatgtattccattatggtttattactgcttattattccattgttctttatgtttagagcgggaagaaagttagctaaattaccgaccgccaatatatatattacattagcggtatgtagtggttcttacacaattatgatgattgtaatgaatatgatttctaagttccaaattaatgtttcaggaacggtaacaggtttatttggaacaagtggaacggtattatctatgcaaaattcatttatatatttaactttgtttagcttgattgtgacatatgtagcggcatttgctggaatgaaattagctaaaaaataggaggagagcacgttgaagttttgtggaacatgtaaaaagaatgttgcagaccatttgaacttttgtcctgagtgtgggagtaaagtagaagtaatcgttgataacactgctgcttcatatacagaattacaaagcgagacaaaatcagtgaaaagtaagaaaaatttatttttgatcattggttttgctgttattgctgcattattatttggggcatataaatttggagcatataagttttcaaaagaaaagcaagtaaatgtaatgattgaagcattccaaaagaaagatattaatgcaattgatgagtttgtaaaagcgaatgattcaagcttaaagattaagacagaggatattaaagcgtacatgcgttatttaaaagagaatccttcttacaacaaacaattactgtcttatttacagaaagagacagtagatcaaaagttaactaaagataaatcttcatttaaggacggggaaatagtagaagagggaaaagagtggttcttatatccaaagtataagttcagcatgaaatcttattatatgagcattagtacaactgcaaaaaatgcagaaatacatgtgaataacaaaaaagaaacagagctttctagtgataaaacttcgaaagagttggggccatacttcccaggtacatatgttgtaaaggcaacggcgaagacagaactgactgaattagaaacagagaaagaagtagatttagcggatgaacagagcgagaaggtgaaagtggatttatcgcttgaaggtaagtatgtaagcatttcttctgatgaaagtgatgcaactgtatttgtgaatgggaaaaaacgtggaaaattaaattatggaagttataagcttggccctgtatccacagatgaaacagtagaagtacatttagagaaaactactgattttggtgtgatgaaatctgaaagtgttaaaattggagaccaaagcacgtattacttaaaattcccgaaagaaacatcaagttcagcagtgggcgaatttgtaagaaatcatatttatgataacgtacgtgcaatttcattaaatgattttagtttaattgaaaagaattatgataagagtgggaaatcgtataaggaagaccgtgattatatacagtatttacacaaaaaaggaattacagaagacttattaacgatggaagttcgtaatgtagagcgtcaaagtgatacgaaatataaagtaacgacatatgaagagtatcatattcgttacggtgatggatctgtgaagttcaaaagttttaatagcgaacatattgtaactgtgaatggaaatggaaagatgttgtatcattctcttggtgcaaataatacgttgaaatcagaagatgtatctggtccaactcgttaatatgagagaagctgttcaatatttgaacagcttcttttttgtagctaaatcgatatttcgtgtccaaccgttgatatatcgtaagttatgatagatataattgaaaaatcgttgatatatttttttacaattatgagtgtgtttcctttaatatttcttgtacatatggatcatgtaatatttgctctataattggtaacatgttttgttcaaatggaatgtcgataggaaatggcttttgagagcctggttttattccatattgcacaattttgtaatgtgtattgttttcagacttgagcacaattaacttatagcgtttatcatcgccagcgagtgaaaaatcaatagaagtagcgttatatgtcacttcatctttatatatgtacggttttggcgtaccaatccagtctacttttgcttgtacattcatgggcatagcctccttatatgtattataaataaatacaagccagctctcaataaagagaaccggcttgtaatttagcagttattggttattttaaaattttcactttaacagttttgcgtccccatttttgagcagcgctatctgatccaagtaagatatcgatacggttacctttaattgcaccaccagtatctccagcgatagcttctccgtaaccttctacccatactttagatcctaatgggattactttcgggtcaacagcgatcattttcatgtttggattcgcagttaaatcatgacccattgcagttaatacacggccgccatatgtgccaccgttttcgctcgggtgagctgtatatgctgtagctacaactgttaactcacgaccaccagatggttcgctagtttcagcagctttcacagcaggcttagcagctggttttgcttgtgctacaggtgtttgagccttagctggtgcttcagctttagcaggagccgttgtttcttgtttctcaattacaggtgctgtacctgttaagaaaggaacatgaacataagctgttttcccgttatattcaaattgtaaccactcattttgtacttggttcgttgtttcgattacatcgtctttcttcaactttccaagaacctctgagtttgtgttcgcttcagcacgtacgtttaatacgttagctgttacgtagtagatgctttttgtgaactctgcacttacgaatgcgtctttaccgtctaaagtaacttttgaccatccgttctctgtattttgtacatctattttattaccgtttagtaatttaccgacaacttttgattccgtagtagggttttcgcgtacgtttagtacatctgttgttacaacagtttctgcattagcagatgatgtgaaaatcccaagaccaaaaactgctgctgttgctataccaattaattttttcatgatagcctccattgcgtttgttttcgtgtcctcattatagcaacagattttttcggatttggggaaaacacacaattacaaaccattcgtaataagtcgttaatatcctgtaatataacaaaaaatataagaaagcgtttttcattctatatgaatcataggtttctagttatattcaaaatatttaatacaacatgtttttttcgacgtaaataaaaatattacagtaatgttacataatgtttactaaacgattacattccttgagtattttaccgttttatgggtaatatagttatataaacataaacattttgtttgtgaagctataaacacgtgctatatactagaaaaaaaaccgcataattgttacaaaacgaaagggttgcaaggaagaaatttgcccttttttacatatgtaacacatccttttttaggaaaatacattcctatccgcgtttttctcacacaatttgacagcagtatttctagcttgtagctcttgcagagtgaaaaggttatacgaaaggtaaggctgtccataagaattcgaattggtgaaggtgaaagtaagaaaatcaccgcaaaattatagttttctatccgattttacatatcggaatttatgttatttacaaaagcgaaacctacgaagggggatttgatgaggaaactgacaaaaacattcatcgtttcattaacattatgtattgcatttacaatttgggggattattcccgaatctattattggaaaaggtagtttaggaaatgtaacaaccgcaattcaaactgcattagttagtaagttcggctggttttatattatttccgtttctattattttaggtgtgtctatctttttaattgtttcgaaatacggttctattcgtttaggtaaagatgatgacgaacctgattatagttatatgacatggtttgctatgctatttagtgctggtatgggtatcggcttagttttctggggcgttgctgaaccattaaaccatttatacgcacctccgtttggagaaggtgcaactgaggaaagtgcgcgtcttgcactgcgtttttcatttttccattggggattacatccttggggactatatgcgtttgtagcgttatgtattgcttactttacctttagaaaaggaaaagcaagtacgattagtgcgacagtaggtccgttatttaagggcggggaacacgggcgtattgctcattcatttgatgtgttagctgtttttgcaactgtgttcggtgttgcaacgtcattaggtctcggtgcaaaacaaattgcaggtggtgttagctatttaacatctatcccaaattcattaacgacacagttagttattattgcaatcgtaacagtattatttatgttatctgcgcaaacaggtctggataagggaattaaatatttaagtaatacgaacattatttttgcgtttgcacttatgattattgtattatttgcgggtccaacaaactttattatgaattacttcacttcaacaatcggttcttatattcaggaattaccaagcatgagcttccgtttaagtccattagacgaaggtgggaaccaatggattcaatcgtggacaattttctattgggcatggtggattgcatggtcaccattcgtaggtacgtttattgctcgtgtttcacgaggtcgtacaattcgtgaatttgtaatcggtgtgttacttgtgccgaccgtaattggtgcactttggttctctgttttcggcggaacaggtattcatatggagctgtttggtgatgcacatatcttcgaaaaagtgaaagagatgggaacagaagtaggattattcgctatgttcgatcagatgggcagctttggatcagctttatcagttttaggtattttacttattgcaacattctttattacatctgcagactctgcaacattcgttttagggatgttaacgacacatggtagtttaaacccaccaaatcgtattaaaatgatttggggtatcgttctagccgcgatagcttctacgctattatatattggcggattagaagcattacaaacggcagctattattgcagcgttcccgttcgtctttgttattttctttatgatggcagcattatttaaagagttacaaaaagaaggacgtatgaagcgtcattaataatagaaggaaaagagctgatttcatatcagctctttttttatccctctatttgctgagcagtaagaaccccacctcaaaattcagcaaaagcaaataaatcgagctgcttgtaaaagccccattggtgatggctaatgaaagtttcactttatatagaaggaatttaaaatgcgggtaggggaaataaaatactttaccacataagtagtatgccttttatacgaagaaaaaacgataggtttcgacaatattcgatcccttacgaattctattcatatttttgacaaaaaattgtcggaaatgtgttgtcacgtttatatatatgtgctatattatttcctgtaagcgatttcaaatagttttaaagcgcattcaagggggacatctagaataatgaaacgttacgaaagaaagtggaagcatatttgtttgaaacgtgtggcacatcgtagtgtccaagaaagcacggaacctaagactgaaacgcgcaaagaacagcaagagaagcaattggttctacaaaaatagcaatcactttttcgtatataaatgaaggtcgatcgttcgttgggggatggacgtgaaattactttcagctaaggggtattgtctgatatataatttatacggcaataaataagcacagagcatacggcgctctgtgcttatttttattatttatcttttttgaatcgaactgttttatcccagccaatgacttgtttcttgctctttgcacgtaagtataagattaagctacgaataaataagtacgtaaagagctgtgcgtacgtaaagtacataataacgctaataaaaatattagtcggtgtaaaggttcgttcgacactctgggcactaaataattgagaaacatatgtaatatatgcgacataccacataaatagtagcggaatgctatattgaatttggaatatcccgagcagcccaattacaaaccaaacgttcgaaatgattaggaatagccaaaatacaacatacactagaacttgttgtaaggaatgaacaagcagctttcctttaaagaaacttagtgatgagaacattttttctaaaatatataaattcccttggagccaacgtgtacgctgtttaataagaatttttaaatgctctggttcttgttcccaagtaactgattctgggacgattggtaagagataacctttttgtgtaattcgtaatgttaattcagcatcttctgcaattgcataagggtcatagccaccaagctcttctagtgcggagcgacgaagaagcatatttgttcctgtcagtgagcctgtttggaatagtaaccagcgtccagattgcataaggagctggaagatttgaaattctagcgaaatcattcgcgtcaaccagtttcttttttcgtttactgtacgaacgtgtccaacagctccaacagcatcttcagttgtttcagcgtgctctacaagcattcgcagtgcgtgtggttcaggctggttatctgcatcgtaaacacagaagtattcaccatctgaaatactaagcccgtagtttaatacacgtgatttacccttcggttcaccgggaggaacacgaatgtggcgaatatgagcataagctttgtcgaaatcatcgccgatttcaggtgtttcatcttgagagttatcatttaataaataaatagttagctttcctggatattcaatcttcgccatcgcctctaaagtatctttaataacgacaccttcattatgggcaggtatgaaaatatcgacgctcggataatgttctagcgtacgatcttttcgtttactatttcggtgaattaggcccgcgattgttaataaagagtagtaaacgagtaagccagagaatagaaaagccgtaaaaataagtacatatttaattgaaaatgtgatactaatccaaaaaacgagtacgcaaaacagaaggaataaaagaagtataacgagagtcatcataacagggtttgtcctttgtttccaatttgctcgcgtgaaatttttatatctcggattgcttcagcagcaagccattgctccatttttggctttaggcggttcattacaatgtcagcaccagcttcatttgtgttttgtaataaaataactagcgtattattatcatatttagcagcaaggtcaaaatcattccttactgtttcaactaataaagaagctacacggttcataacactttccttcgtatatttactaaaggaagtgaaatcaaagtaaatgataacgcctgtttcattacgacgattcattgcagtcgttaataacgcttggcgtctctcgaattcttgtcttgttagtaattttgattctccaatatattgttctaatgttctcacacgctcagttaaagttttattttcatgaatcacttttttcaataggtgagttgttatatatacaatgaagaagttagctgccatcaggaagtggataatcatatattgccattgatctgatgtactccataagtgaagccatgcttgatagaacaaataaaatacggaaataatggttcctagtatgaagaaaacaaatgctgttttgtcagctaaaaataagaatagtacatttacgattacgtatattattgtaaaaatgagcgcatgctcatatttcgtcacatgtacagtagtaaaataaaatacaatttgtaaaatccacatagagaggattttatagaatttatctttcacaaaactttcctccttaaagctatttcatcaatagatacttgtagtatgcgcaattattaagaaattgaccatgtcgttacactcttttgaagggcaacaacaagtagtatctctattttcatcggaaaaataaaaagacttaaagattattgtatcataatgttcttatatttgggataaagtgattaatagatgcataaaagacgtttggattgcatgaaaaaagtctcctcttgtagaaagagaagactttatataagtttataggaacatcatacctgcaactgctgcatttaagaagttcgctaatgtaccagcgataactgctttaatccctaattgtgcaatttgtttacggcgagtaggagctagcgttcctgttacacctaattgaattgcgatagaagagaagtttgcgaatccacagattgcgaatgttaaaattagatttgtcttgtcagagaaatctgccatgtgtggtcctaagtttgcgtatgcaacgaattcgttgattgcaagtttttgaccaataaagcttgctgcttgtacagcttcacctggagaaaccccgattaagattgcgaatggtgatagtaagtagccgaagattaaatcaaggctaagtttaatatggaataaagacccaactaatcctaatagcccatttaataaagcgattaatgcgatgaaagccattaacattgctgctacgttaataacaagttgcataccttcagatgcgccgcgtgcagctgcatcaataacatttgcgtcttcacgttctgtagaaagttcaacgttattatctactttttctgtctctggcatgattagtttcgcaattaataagctcgatggagccgccataattgcagctgctaataagtgctctaacggaatacccattgctgcataaccgacaagaacggatccagcaacagctgtcataccgcttaccataatagtgaagaattcactatttgttaagcgtgctaagtaaggtttaattaaaattggagcttcagtttgtcctaaaaatacagtcgttactgagtttaggctttctgctttagaagttccaagaagtttacttaatgcaccaccaacgatgctaacaaatttctgcataataccgaaataatataagattgctactaatgaactaataaatacgattggaagtagtgcttgaataaagaatacaaatccccaaggtccctttgcgttgactaaatccccggtaacgaacttaattccctcgtaagaaaaattaattaatccttgaacaccgtcagcagcgtgttttaaacctgctttaccagcgtcccatcgtaatacgataaatgaaaatgacatttgtaatgctagcgcgattaaaattgtgcgccaattaatagctttgcggttggaagatagtagaaaagcaattgctaatactccaatcacgccgccaattccccataaaagattcatgcagtgtatgctccttcctcatagtaaaaacagtgtataaaccagttgtctatacgtttgcgaatataacatctttagtaacttatcataatggacatcggaggtcaaacgtctaatgaaaagtttaaataaaaagaaaattcttcaaaaaaacacatataaaataaatagacatgaaataggttatgttttttatgaaaatatatacattatgataacgttatgcattgtttttgtagaataaagtgtatgaaatggaagaatggatacattatttttatagagggaagctaggggaaagggagtaatgtgttgaaatcgtacaaaaaagccttctagtaaactagaaggctttgaaactattaattaaggtgctttcgtgtatcctaagaagtggctcttccaataagagttacttaatgaagcgattgctacacctttatctccagcttggataaatgatccgcccccaaggtaaatacccatgtgagaaggaccagatttataagtgttttggaaataaattaagtcaccaggttgtggacttgaagtttgtggtaggctactccaatatcctgcaacactttggcggctaatgttatgaccaaatttcttaaatacgtggtagatgtagccactgcagtctacgccgttagcagaagttccgccccaaacgtacggtacaccttgcattgattttgcatatgcaagtacggaagaactgtcgccgctattgttgcctgtattattattgttgttattgttttgattgttattttggttattgttaggcttattatctactgcgcctccaactggtgttttagataggtaacgtgttccgatataaccagtttgcccgttgtagttaattttgctccatccagagttttcagagattacttgaaccttctgaccttgtggaagtgcgcctatgattctataatttgtaccttcgccgctacgtacatttagtgcagaagcattaatgtagtaatcgccaattgcaccttggttaggttgttcaggttgttttggttgctcaggagtagtagtgccacctttaacgaattttacaaattcgctactaacaaagcctgtttttccttggtaatttactttaaaccaaccgttttcagatccaactacgtttaatgtggtgccgtttaaaacgccaccaattacactatggtaagcggcagggcctgtacgaacacgtaaagatgtagcgttaactacgtaagaaccgccagtttgaatagttccattattattgttttgctcttgtttgttgccttctgtaacgttttcgttagaaccgccttttgttacatagtctttgcttatataagcagtttgtcctgcgtaattgattttgaaccaatcttgaacttctccaacaacttgtactacttgtccttttgtaacagaacctacagttgtgtgagaagtgctaggacctgtacgaacgcgaagggaagatacatttactgtatagtttccgcttgctggttttacttcttggttgttattattcgtattgttgtttgaagaacctgcattagaagaaacgccagatacgaattcgccacttacataacctacttgtccattatggttaattttcacccaaccattttcttgtccaattacgtttaatgtttgtccttcatatacacgcccagaaacagaactagatgtgttaggagctgtacgtacacgtaatacatcagcggtaactttattgtttccacctgtacttacattgttgtttgctgcgccactttttgatacaaattcgccactaacaaagcctgtttgtccattaatgttaattttgaaccaaccgttttcttcgccaatcacgtttagtgattgaccgttataaacgcgtgagatgatgtcgtgagaagtgtttgatcccgcacgaacatgtaatacgctcgcgtttaccttataagatgagctgtttgatgcagaagcttggacagttgtagcagctttttgtgtattttgttcaggtgcagcttgaacactatcaagtgtaggtgctgctcctcctgctacagacactgccgcaagaccggcaagatactttttcataatttgtcgattcctttctgtctgtaatgtagtgaagaaatatttaccaactgttaaaaattctaaagagcatgtcgattactgtcaagacttatataggaatctgaatatgacaaaaagattacaagaaaaaaatcaaggcataaaattacaccttgatttccatttaaatgcatatattgaatatgaaaggacagaaattattcgtgtttaagaagatgccatattggattgtaataagatttgattaaaagatttttgcagttttttggtgataggcccaacttgcccatcttgaatcgcggtcccatcaaggtgggtcattggtaaaatttcaatcgttgtgcctgtaaaaaagcattcatctgcttgataaacgtcacgaacgctgaaaagttcttcctgcacaggaatgtgaagagtattcgctaaagaaaggacatattgacgaataatgccatttaaaataaggtgattggctggatgtgtgtaaagcgttccgtttttaattaaaaagaagttggaatggcttccttccgttacaataccgttccttacgagaagtgcctctttacagcctttccgttcagctttcgtagcagctagtacgtttggtaataaatttaatgatttaatgtcacagcgtagccatcgagtatcgggttctgatatagcgcgtataccatattcaatccataaagccggtcgttctttttttgtaatataggcataaattgtcggagggttgtcatatgaaaatacatgtgtgcgagcttgtacaccacgagatacttgcaaataaatggtgccatcttcgtggaaatggtttcgttcaattaatttgtaaagtaaagtgatgagctcagcttttgagaaagggagcgataattctacttcttccatggatcgatataatctcgttatgtgcggatctaataaatgaaagttccctttatataggcgaataacctcatagacaccatctccgaactgcgaacctctttcttcaagttctatgtacgtttgttgttttgttgtatcaataacttcatcattccaaagtacaaatttttcgtatgccaatttccgtcccatcctttcgtaagtacgtaagtaacgtgaaactttcattcatgcgagataaaaatcactatagtaatttttatgtgagcaattctctacatatgaccatatatgtatttgtaaatcatagagaaataaggatgatctaccccgcattaacggcagtaaagcccctacttacaaattccggtagagcaaagaagtgaagtgggcgaatcactgcccgtaaatgcccgattgatgagggctgattaaagtttcactttacagcattttgtatatacaaattcgaaaataagaaatgagaatcctgcttttaaataaaaaaaagcaacattcttatggaatgctgcacaaggagggtagctatctttcatagggacattgtctcgttgaatgctttgtgtatggaaacaaaacaagttgaaagacaattataagaaagtagaaacaaaagatttacacatttctttaagggatcttacgaaagatgagagataagaaatatgtagaacctcgtttacatattttattatagagattcttcattaacactatgtgaatatttggtaaaggttatgtaattttaaagttaatgaatataagtagttgtatggaagaaaataaaaaaagaggctgagattactcagcgctcttcttttcttctttaataactgtttttacttcaccagttttgatcttattactttcagagaagcgaagtaagtcaccttcaatgattttatcagacatgttcaattcattttgggcacgatcaattagtggctgggattcttctttcggtaattgtacaacttcgccagtagcacggtcatagaatgtactgtttgtgtacatgtatttatctgtaacgaagctaccgtcacgaagaacaacgaatcctttattatcaggtgagaatacatcatgaccgaatcgaacgtcatttgtagaatctacaccaagtaagtttagaatagttggtttaatgtcaatttcaccagttggttttgaaattgttttaccttctttttgacctggaacgtgaataaacatcggtgttttttgtaagttcatatggtcaaatgcagtgatttcttcttttcctaagaactgtgccattgcacggttatggttttcagaaataccgtagtggtcaccgtagaatacgattactgagttgtcgtaaataccttctgcttttagacgctcaataaagtgtttcattgcttcgtctaagtaacgagcagttaccatgtaacggtcaaatacgccatcaccagaattgtattcgtcgattaatttcgtattatcatcgtaagtgaatgggtaatgattcgttaaagtaaggaagcgagtatagaatggttgcttcacttgttttaacatatcaacagattgatcgaagtactcgatatcttttaatccccagtttagttttgtttccggtgtaatcttgtagtcaagctcgttgtagtaacgatcataaccaagtgccggatacataatgttacggttccagaatgttgcgttgtttgcatggaatactgcagtgtagtatccttgctgacgtaaaatttctggagttgctgtatattcattgttaccgtgtgtgaagaatacagcaccgcggtctagtggatataaagaagtatctactaggaattcagcatcagatgttttaccttgcccagtttgatggaagaagttatcaaagtaataactttctttcgtaaattggtttaagaatggtgtaacttcttgtccgttaactgttgcgccaattaagaatgtttgtaacgactcaagagagacaacaattacgtttttcccttttgcagtaccgaacatatttggatctggtttactttgtgttgttttcacatagttttctgtttcttgtaatttactaccgtcagcgaatgctttttgtgaacttgattttgcttgtaagccaagatcgtatacttggtgtacatataatcctaagtttttaacaagcataacgcggtcgaatgaacgtgttaatagttctgggcgttcagcttctgcaagtcctaagtttgcgaagaaaatagcaactgttgatacgaagtatagggaacgcatcgggcgtgctacacgctctgtaggtgcaaagtttttcattttctttaatagaacgaagaaaatgataatgtctgcaaatgcaagaataattttgtagttaaataattctttcacactagaacctaaacttccgaagttagatgtttgtcctagcaccggtaatgtaacgaagtcattgtagaatccgtagaacattacgttaccaacaagaacgattgttaagacaaaattaattccaagtgctatatagttacgttttttcccttttgcaaataatgcaagaccaacaagcagtaatgatgctgctaatgggctaaggaataaaatgaattcttgcatgaaagattcaagttttaagtcaaagcttgtgcgtgtaataaggtaagttttcagccataaggctaaagctacgaatacagtaaaacgcacattttgaaattgtgatttcaaggtttctttcattcatttccaccctttctctatcaggcttggtcgattttggagcgaaaaatgctaaaataaaaaatacatagttttcttggccataattaaaggttctatattcacccatatacgactataactatgcatacccttttggtttcttttgttgctcataagcataacgtcatttctgtattatacaacaaaattcatttctgagaaacactataacattttacattttttgtataagatttgtcactaccagagaaaactttaacattcgtttatatgtccgtcaactagaaaatataacaaaggtagagcagaatgttaagtggaagtgaaaattttctttgttgagaaataagaaatgaagatgggtaagggttatctagaaatctattatatgaaggaaatagtgtaaaaattaacgaacacttgttcttttttggtttgtttgttacaataaaagttcattgataggttttgtgtaatttccataaacttttactgataacatattgtagcttatttctttttaaaaatagggaggctttttacatgaaacaaaaattttcagttgaagcgttttggaagaaagtaaaacatgttgcaaagcaagcagggcaatcggtcatttatgcaagtttattactgttttacgttttgcaaagacccgatgttccaaaacgagtgaaaattattgtaattggagcacttgcttattttattgcaccgattgatgcgattccagatttcattgctggaattggctatacggatgatttaggggcgttaacggccgcactaatacaggtgtcgttatacgtcaatgaagatgtgaaagataaggcacgagtgaagttggcagaatggtttagttcggatatagacacaacatttatcgatcagaaattaggtcaataggtgaaatctgtcataaggtgacaggacgaacgtaagcgaggaagtgcattatgccatcaggaagaacgcatacgaaaataaacttaatatcccttccggttgttttgtttttgctcttttcgtatggattaacaaattttgattttttattaacttttgcaattggttttttagtaggtacttcatttttaacaccagatttagatacgtacagtaatgcttataacaaatggggtttcttacgtatattttggtatccttataagaaagtaatgccgcatcgatctttctttacgcatacgattatacttggtgatgtgattcgtattgcgtacatgttaatcgttttttctccatttttattactattaaatgtagtcgcactggatggtaatttaatagaaattgcgaagaagcatgaggttgaaattgtaacgttcttaatgggaattgttgtggcaagtacgctccacattatagcggataaagtgaatacgcgccgaaagaaaatgatgagaaaaaagaagaaacgcagaagataaagtgaacgaattaggaaaagggccccttgcaaattgcaaggggccctttttaaacaaacatttgtttaaaattaagctttcagcactttaatgccttttacaatgttccagatgaagtagtataagctgatgattccgcaaatagctaagacaatcattgatccaattccaagtgttacgtctggttgatcagatccaaggcccataattcctagaatagttacgccaatgaatgtagcgatacttggaatgatgtgtgtccatagagcacgttttgcatgtggttttgtttcagcgtctcccacaatccaaacgataatagggaataagataggggcaaatagtacactaaagtatgataacgcagctaatattttatttccgttcatatatatcacctcatgaataatttctgttgttatactattattatgcaataattttggcaaacttcctatcgatgaacattacaagaacgtgacgattttgtaagattttctgttaaataataaaattttcaaaaaaatcttttttaatagaaattgttatggtacagtataaatgaaagttgttgaaaacgttttcttgaacgtttttttattttaggcttaaaggtatgatgacctgatagtctattggtgaggttattctatttaaaaggggattctttaggggggtaactaactgttacgatttatttaaccaattataaccaaagttaattaaatatatcagtaagccctgctagtcaagtgattggctagtagtgagggttaactgcgggcaatccctaaagctgattgaactacaacgtgaccagaaatggtgagcgtgaatgtcgcgaaagcagaaaaaatcaatcagatcgtgcaaggttaaatcctaaacactagaacaatgggtcttccgcctcgaatcatctaagtcaaaatggataagatgaacgttcaacgactatctcgtataactgacgagagtacatcacaagcctatggtggtggaaaaatcctctatctctaaagagataaacatatagtctgcgctcatgtgaaaatatgagaagttcataagagaactggctaaggaattgcgcccttagttgaacgagataaatttaattaaatctatcaaacctcattgaatccatagaacgtatgtgctacattggatttaatgagctaagaataataatgaaattttcacgagttagtcaagtatcggaattaacaggtttgtatcctggtagtctcaggagaatgctggtggaacacgctacgattcagaagaacaaatctttcattaaaggagttacattctgatgatattggcgaagaaagtcagactgattccaacgcctgagcaagaacaagtgcttagaaaccatgctggtgctgcaagatttgcttataactattgtaaaagaatgagtgatagatactataagctatttggaaaatctgtttcacagttagctttacagaaacgatttacaaagatcaagaagcgaaagagatatgagtggttaaaagacattaatgcacaagttcccaaacaggcttcaaaagattttgatacggcgagaaaacattcgttcaaaaagtacaaaaatggttatcacacttcttataaatccaaaaaagatttaatccaaggattttatgccaattatgaaagactggttataggaaagaaagtcgttcatattcagtctattggagaagtgaaaacaagccaacaactaccaagaaataaaaaaccatccaatccacgagttacctttgatggtcgtcactggtggattagtgtagggttccaagaagactttgaatcacaagaactaacgaatgagtcgattggtgtggatgttggtttaaaagaactttttgtagcttctaatggtatgaaagaacgaaatataaacaaagatgctaaggttaaaaaacttttgaaaaggaaaaagtcagcgcaaagagatatgtctaggagatttaaaaaaggtgtgaaaattcagtctgccggatatgaaaaagcgaaagctgagcacctgcggttatctaggaaaattatgaatatccgaaataaccatatccatcaagcaacagctaaattggtgaaaaccaaaccaatgaggattgttgtggaagacttatctatttcaaacctgttaaaaaacaaaaaactatcgaaggcactttcctttcaaaaattaaacttcttctttcaatgtttgtcatacaagtgcgagaagtacggcattgcgtatgaaaaagctgataaatggttcgcctcaagcaagatttgttcatgttgcggagtaaaatacgaccattcagttcaaccagaaggacaatggagtataaaaatacgtgagtggtgttgtgtttcatgcaatagccatcacgatagagatttgaatgctgcgataaatttatcaagatgggtaaaataaatgcttgataataggaggtaacgatactgcctcgtgtggagtgttatacccctcgtccctttggggttgcgagaacacgatgaagcactaactcgtgtaaatttgattgaattgtatagatttagttaagtttatcgtatcggagagaacaatgaacacatggacacaagtttatgatccattcggaaacatttggatttcggcagcggtcgcacttattccgattatcttttttttcttagctttagcagttttccgcatgaaagggtatgtggcaggatttattacagttgtacttacagttttagtagcgttattcgcttataaaatgccgttcacgatggcaatggcagcgaccggatatggtttcttgtacggattatggccaattgcttggattatcattatgtcggtatttttatataaaatttctgtaaaaacaggtcaattcgatgtgattcgtgcatcggtattatcgattacgaatgatcatcgtctactcgttattttaattggattttcatttggagcatttttagaaggagcggcaggatttggggcaccagtagcgattacagcagcacttcttgcgggtcttgggttaaatcctttatacgcagcaggtctttgtttaattgcaaatactgcaccagtggcgttcggagcgatgggaattccgattacagttgctggacaagtaacaggtattgatccacataaaattggacaaatggctgggcatcaattaccgttcctatcattatttgttccattctttatcgtatttttaatggatggatttaaagggatacgacaaacgtggcctgcgttacttgtagcgggtagttcatttgcgattacgcagttcattacagcgacatttttagggccagaacttccggatattacatcagcacttgtaagtttaattagtttagcgctgttcttaaaagtttggcagccgaaagaaatttatcaatccgggcgagcaaatagtgaagtagcagtaacaacgacagcggcatcgatgccgaaattaacgtttggaaaagtagtgaaagcatggtctccatttatcgtattaacggttatggtagtcatttggagccaaagtttctttaaggcactatttgcttcaggaggggctttagaaagtcttgtatttaagtttgaaattccaggtctgcataatttagtaatgaaagcagagccaattgtaaataaaccaatgccttacgaggcaattttgaagtttgatgtattatcggcaactggaacagcgattttaattgcttgtatcatttccatgtttattttgaaaatgaatgtaaaagatgcagtagtgacatttaaagaaacgttaagcgaattaaaaatgccaattctatctatcggattcgtactagggtttgcatttatcgcaaactattctggtctatcttccacgttagcgttagcattagccggaactggtggactattcccgttcttctcaccattcttaggctggattggcgtattcctaacagggtctgatacgtctgcgaatgcactgttctcaaatttacaagccattacagcgcagcaagtcggcgtatctgaagtgcttctcgttgcagcaaatacaacaggcggtgtaacagggaaaatgatttccccgcagtcgattgcgatcgcttgtgcggcggttggtcttgctggaaaagaatcggatttgttccgttttacagtgaagcatagcttattcttcgtaattattgttggtattatgacgtatgtgcaggcgtattatttaacgtggatgattccgtaaagagcaaaagaaataaacttttcatttttcagattatcgtgtatgatgggaaagtattgaaaattaaatcagtgataaactaggggtgcctaacgtatgcgtaggctgagagagaagcgcgtgaacttcttaaccctttggacctgatctggctcgtaccagcgtagggaagttaacggctttacataatgatgtctttatgagccaggtccttatttttttatggacctggctctttttattttggcatgcgctggccatatcttgtccttgtcacgaacaggggggcaacaaaatttatgaaacaatctgtttcagctgagcaaattgaattgaagtcgagtttaccagggagtaagaaagtatatgtggatggaccacgagaaggtatgaaagtgccgatgcgtgagattgaacaaagcgaaacgaatggcgttccaaatccaccaatccgtgtgtatgatacgagcggtccttatacagatcctgcgtataaggtcgagttggaaaaaggaattccaacgccgcgccactcttggattatggggcgtggtgatgtagaagcatacgaagggcgtgaagtgaaaccagaggatgacggtgtgagagtagcttcgaaacatacacctgttttcccgcaaatggatcgccagccacttagagcaaagcaaggtgcaaatgttacgcaaatgcactatgcacgtaatggcattattacgtctgagatggaatacgttgcgattcgtgaaggggtagagccggagtttgttcgtaaggaaatcgcagaaggccgcgctattttaccagcgaatattaatcatccagaagctgaaccgatgatcatcgggcgtaattttcatgtgaaggtaaacgcgaatatcggaaactcagctgtatcttcttcgattgcagaagaagtagagaagatgacatgggcaacgcgctggggtgcggatacgattatggatttatctacaggtaaaaatattcatacgacgcgtgagtggattattcgtaacgcgcctgtaccagttggaactgtaccgatctatcaagcgctggaaaaagtaaacggaattgcagaagatttaacgtgggaagtatatcgtgatacgttaattgagcaggcggagcaaggcgtagattactttacaattcacgctggtgtattacttcgttacattccaattactgcaaagcgtacgacaggtatcgtttcgcgcggtggttcgattatggcacagtggtgtttattccatcataaagaaaacttcctatacactcattttgaagagatttgtgaaattatgaagcagtatgatgtttcgttctctcttggagatggattacgcccaggttcaattgcagatgcaaatgacgaagcacagttttctgagcttgaaacacttggtgaattaaccaaaattgcttggaaacatgatgtgcaagttatgattgaaggacctggacacgtaccgatgcacttaattaaagagaatatggagaaagagcttgatatttgtcagggcgcgccgttttacacacttgggccgctaacgacagatattgcaccaggttatgaccatattacatctgcaattggagctgctatgattggctggtttggaacagcgatgctttgttatgtaacgccgaaagaacatttaggtttgccaaacaaagatgatgtacgcacgggtgttattacgtacaaaattgcagcgcatgcggctgatcttgcgaaaggacataaaacggctcatcagcgtgatgatgcactttcaaaagcacgcttcgaattccgttggcgcgatcaatttaatttatctttagatcctgaacgtgcgatggaatatcatgatgaaacgttgcctgcagaaggggcaaagacagctcacttctgttcaatgtgtggaccgaagttttgtagtatgagaatttcacatgatattcgtgaatatgcaaaagaaaatgatttagaaacgaaagaagcaattgaaaaaggaatgaaagagaaagcagaagaatttaaagaagctggtagtcatttatatcaataacatgttacacctctttacttgattgatcacactgtagtacctaactttattatagaagaagccccatttgctaagacggtagcaaatggggcttctgttgtttataaggcaaagaagagatgtacccagtagaataagagaaatagtgtgacgactgttgtgagcgggataacgataagggatacacttaaatagtctttccattttactttaattttgttttgtttcagaatatacatccaaatgagtgaagctagcgtaccaattggtagtaatagtgaaccgatgtcactaccaatgatgtttgcaagatagatagtttttaatgtgactggatctagtcccatttctgttaatgtgattgtaccaatcataagggcaggatggttattgaagacgttagagaggatggatacaagtccgcccatcgcaaagctagcatagagtagatgctgattcacaattggctcgagccattgtacaagtacagctgttaatcctgcgttgtggagtccgtaaataatgacgtacatagagaaggcgaaaattaaaatgtgccacggtgtctttttcaaaatgtcgacaggatttgttcgtaagtagtaccatctccaaatgagaagaacgagtgaaccaagtactgcaacgatttcaattgggatggataagaaggatgcaacgaatagaagacagcgcatcaggaagacgaaacctaatacttttaacatgaatcttgtccgtttttgtttcgtatcaacagaattatttccttttagtggatggaagtttttcgtgaagaaaatttcttcaatatcatatgaagaaacaggtaattttttcggaagttttttcttcaaaactgtatacatgagccatgacataaataataagcctaatgttgcaggtacaaacatcatagcagtatgcatataaagagtcatatggacgatgtttaatgcgattaaatttacgatattacttacaccaattggtgcactagatgccgtagcgattaaagcaccacttaataaataaggaatttgttgatgtggttttaattgaaggttttttagaagaagaattaaaattggagttgtaattaaaatactaccgtcgttattaaataaaagagtcataagaaaacataataattgaatataccagtataagcggcgcccagaaccctttgctaaatttgctagtttcgctgcggaccaatggaagaagccgaagctttctaatataactgccataacaatagttgctaatattgttatggaggcaccgccaattttacttataatatccatgatgtctggttttgatacaagtccagtaattatgatgataccagctccgattgctgctggccaagcctcatttaagccgcggggtcgccaaaagataacgatcatcgttaagaaaaatacaataatagtaatccatatttcaatgctcatattttgcctacctttctattttcccttgaacagatgtagcttgtctcaagtttatattggtagtatattcagcaaaaaataagaagaactagacgtataacgagatgaaccgaatatgtgtttttcatgctaaaggacaggtgtcacgaatagtgaaataactattatgagaggagtctataaattattggggcagtaagatagtaaatgaaatttatatgggcgattattgagatgtattggcgcaagttaaaatatatcagcgattattgagatatatcggcgcaagttaaaatatatcagcgattattgaaatatatcggcgcaactcaaaatatatcagcgatttttaaaatatatcgacttatcgacaaaacacgacaaaaggagtctatcctaaaatgccttttggaacagactccaatgctatattatttttccttcaaaaaagtacgatccttcaagaataagttccagaagaaaataaatcctggtaataaaattgcaatcccaattgcgtatagaatgagcagtgcatagaacgtttctttcgttgtaaagcttgtaaatacagttacgtcaggataaataatatacggtaaatgcgcgaccccgtaagcatagcttgcaaatgcatattgagcgacgacagctaaaacggcaatgcgagggtatcctagtgtattgtactttttgtttgtccaccaaagggacgagtatccgataacgaataaaacaatagaaactgtaaaccacgggaattgctttattaatccttgcataacccaatgtgtttctggatccattacaacgagggcaataattgccgtaacgagcgttgcaggaccaaggatgatagcatttcttctataaattctatacgtatcttctgaactttgttctctcgaaaaatcagcaagaaagagagaggagagaaatagttcagaagttagtccgaagagcatataacagtagataactgggctagaaagaagttttccatataggagtacttcctttccttcagacattgtaatataggctccctctgtaacgggtaaaacggtaattaatagtgctggaattaatagaccagtaatacctgaaataacccgaagaaggtattggtattttggcaaggagtaagcaaataccataaatgtactacgtactgcaatgagcactaaaattaacataactggtacgaacattactgtcgcaagagtaaaggccgctttcggaaagaagccgagaaatgcgacaacgacgaaaacaagaaacgtatttgttacttcccaagttggtgataagtaccgattcgcaagtttagcagcgagcgtcggatgttttgcgtataccatgccccaaaaaccagcgccaaaatcaatggaccctagtatactgtatacgaaaataagggcccataagatgatgattgcaatactttcctcatacatgagaatcgcctccttggtgttgtaaatcattctttaatggatgtcttctaaagaatgtccgtagaacaatgactgttaaaatagcgagtccaatatacaaaatgatgaacaaaacaaataaaggaccgacgaaatcagcgcgtgtagatgcatcgacggtacgttgcataccataaattgtccatggttgacgaccgctacaactgaaaatccatccgaattcaataccgagcatcataattggtccgcatgcggcagccccccaaagtagccacttcggtagttctgttcccttttttcggtacacgaaataccaatataagagtgcaattgttgcaacagcaaaggtaaacgcagcagttcctaccattaagttgaatagtgtatgtgtataaaatggtggccatgtttcttgtgggaattcgtttagtccttttacgacagtgctagggtctagtcccactaataagctaagcatgtttggaatttcaagtgcatagtttagttcaagtgtattaggatccacaactccgccaatggatagcggtgcgtgtgatgtcgtttcaaataaagcttcagcagatgcaagtttttcaggtgagtgtttatgtaaggcaatcgctgattcatgtcctgaaagccacatcgtagcgcctgtaataaatgtaacgacaagccctaatagcagcccttttttatgataagcaatttcacgtgtacttaaatttttcttcaataatttaaatccagcaatagaagcaatgacagctgcaccggttgcataagccgtaataacgacatgaaatgcacttgtgccaaaacttggattaaagaaagctttccacggatcaacgttaaaaacagatccatctggattcattgaaaagcctgctggtgtattcatccatgtatttgctgatgtaataagcacggcggatgccgtggcaccaagcatgacgaaaaatagcgagattaatctcataaatggaggaagtttatcagctgcatatacgtaaatcgacatgaataaagcctccaaaaagaaggcgaaaatctcaatttggaagggaacagaaataacttgcccaacaattttggcgaaaccaggccaaagaagtgagatttgcacaccaacaattgttccagttggaattgctacaccgagaagaatagcaaacgcctttgtccatcttttcgccataatggcatagtcggagtctttcttccagtgatagagtatttcgcttataaaaatcatcaatgaaagtccgacgccaagtgttgcaaaaataatgtggaatgctaatgaagaaccaaaaaatgctcttgctaatgttaccgtatccatatgtaaactcctcttcttttttgccattattttctgattgaattggaagatttattcaaaaaaactaccaaaaatatatatgtatttaaaaagtgaatatgataatataatgttgtaatattttgaatagaaagaaataaatagtttctcatgttttgtttgttttttttacaggaatcttttataatcttttatgcgaacataagttctgttttttcgaaaagaagaagtttatgtgaaatggagagggtgttttatgtatcctgaagtcattaaaaagatggcattttcaaaagagcatagagatttattattgaagctatataataaagagattacacgtcgtgaatatgatcggcttgtacaatcgctatataaaccttctaaagaggtttacgagggatagaaatgggggagacaatctagtggattgtctttttaaatttatgtatgttctgataaaattaaggttagccttactagggaggtgaaaagattgcggaaacgtttatatatagggattggaattatcttcttgatcgctttaggtggaattgtattttggtcagctttacaaggaaaccgtacagaaaattttattttaagacatatggtgaatgacaatggaacgcttgccacgtaccgtttagtagatactaaggcaggtacgggtgaagcaaagggacgtgaagctttatcagaatcagcgggattatggttacaatatacacttgataaagatgatcaggcgttatttgatgagcaagtaaaggttattcaagataatttcgtatataagaatcatatcgttttatggaaactctctgaaaagggagagaggcagtcagctacaaatgcacttatagatgatcttcgtattatagaacaattatatcgtgcttatgaaatgtataaggaagagcgttataaaaaccttgccgatcaattaagtgatgctgtacttcgttataataaaaaagataattattatgttgattattatgatgcagatgcagggaaacaaaataattttgtaacaacatcatacataaatccacgtgcattctcctatatgaagaagtacgacaaagtttctgctcagcaatatcaggaagtcgttcaatttttagcggactatccaaggcatggctgggcattcccgaaagagtataaagaagatggtacatttacgtacgataaagaagtgaatcttattgaccaatcatacgttgcatatcatcgaagtttaggtggtctttcatcaactgcttatttggaatttataaagaagaaattccaggaggatggaaagctatacggtcgttacaatttagaaacgggaaaacaaactgtgaattatgaatcgccagccgcatacggattaacgattttgtacgtactacaaacaggtgataaaaagtttgcgaaagaattgtatgatcatatggccacattccgaaatgataacgtatttagtagatattatggtggatatgtaacaggtgaaaataataatacgcatatttttgataatgtactaccacttttagctgaaatggaattaaaaaagagtgaacaataaaagttgccaccatatgagggtggcaacttttatttgttgatataattttacgtcctaatgttggagaagtaatcaatcacgaattcacggaattgctgagctgtttttgataagtagcgtttttttgaccaacttaatccgatggttcgctgacaattgggttcaataatacgcaacttgcttgatgctaaagtagagttttttaataaagttaaacttggaacaaaagcgatgccgagaccttgcttaatgaggtcgctaatcacggtcggttcatctacttcaaaagcaatatgcggagtgaaaccagcttctttgcaaaattcatccgttaagtgtcgaaatccatagccagtgttcatactaataaacggttcgttttttacttcatgcaggtggatattttttcggcctgataaacgatggcctgaagggacgactaagaaaatttcttctgtaataagtggttcccaaacaatctcctcaccttcaattggcacagaggagatacaaaagtcaatttctatattatctagttgtcgtttcatagaaggagtggatgcaagaaattgttggaatcgaacgttaggatgttctagtaaaaaagagccaagtagttctggtaatattcttggaatagaaacggccagtgtaatagagctttgttgtaattcggctaaatctttaatttctcgttctccttcacttaattcatgaaaaatacgttctactcgttttaaaaatacttttccgaaagaatttaaagtaatctgtcggccttggcgatcaaataaagggactcctaaatccttttcgagtctagcaattgttttgctgagtgaaggttgcgcgatatgcaattcttcagctgcctttgtcatgtgttctagtcgtgcaactgtctgaaagtattttaactggagcagttccatttcgagtctcctttctatagaccaaaaggaatgaattaataattaaagatgtattatacagtatgtaaagtgacgtgtatagtaaatctgttaaaccattcgaagggtgttaaattagaagaggagtatgtttcatgaagggaattaaacttatatttaaagattggaaagcgatgtggcaccataaacatggacgtatcgctttaatttttttattaatcgttccgttaatttattcaggattctttttagctggatattgggatccgtacggaaaattagataaattacctgttgcggttgtgaatttagataagggtgctgcgatggatgaaaaaacaattcatgcaggagacgattttgttaaaaatttaaaagagaataaggaattggcttttcatttcgtatcagaaaaaagtgcggatgaagggttaaaagaagataaatattatatggttgttacgattccggaagatttctctaaaaaggtaagtacacttatggatgagaaaccagagccagcaaagttgcagtacaaagtaaatccaggtaaaaactttgtagcggctcaaattggaacgacagctgttgaaaatatgaaaacaaaaatctcaaacagtattacgaaatcatatacagaaggtgttttttcaaagtttcaagatttggcacaagggttgagtgatgcaagtaatggtgctgagaagttacatgaaggaacgaccgatgcaaaaaatggagcgaatcagcttgcgaatggtattgatcgtttaagtgacgggacatcgaaattgaaagaaggaagtgacaagcttgcgtctagccaatctgccttaacggggggagcaaatgagctgagtcaaggagcgacatcacttcatagtggtatggagttattagcacaaggtgaaaaaacgttacaatcaggagttagtgaattaagtgctggtacaaatgaatgggtgagcggaagtgagaagcttgctgaagggcaagtaaaagcggatggggcggccaatagtgtgaaacaacaattagaagagtacgtgaaaaatcatccagaagtgcagcaagatcccgcttttcaaaaaattgttgctacgtctaatggactagctaaagcaacaagtactttaaataatagccaacaacaattgacacaaggtgcgaagaagctaactgatggtcaacataagattgaagaaggcatgaatacattcggatttaagttaaatgaagctactgctggaacgaaaaagatagcagatggtgcatcgaatttggctgatggatttatgaagtggggaaatggatttacatccctgcaagaaggtgtaaatcagcttgcgagtggtggaacggagctgaataacggtgctagtaaattaacaaatggacttgttaaacttgatgatggtgcgaaagaactttctacgaaattaggagagggcgcagagaagatagcggatgttcgtaatgatgatgcacgcaatacgatgttctcagagccagttcagttagtgaagtcaacagtttctgacgttcctaactacggttcaggcattgcaccatatttcttatcacttgcattttatgttggcggaattatggcatcgaatattttacctcttggccgcagacaaaacatgaaggtaagcggaacggtacattttattaataaactaggattggtatatttaattggactcattcaagcgctactcgtagatgtagttgtgctaggtgttatgaaattagaagtcgcaagtgtgccactctttgttttatcaagtattgttatttcctttacgtttatgacatttattcttatgctagtaacagtatttggtcttgttggaaagttcttagcggtaacgcttcttgtcctgcaattagcgacgagcggaggtactttcccaggagaattaaacatagctgttcttagcaaaattggacagtttctcccaatgtctcattctcttagaggattacaagatgttatttctttaggagattggtcgcaattacaaatgcaaattttaatattgttatgttatctcgttgttgccggtggaattgcttggatcacgagtcatatacagcatagagaaacgaatgcagaacaagtttcttaaaatgaaataagctatccgattttttcggatagcttattttttatttgcgttccattactgcaaagtaattattttcattatcagcaaagttgaatgctctaccagtaggtaaatctacaacctgtccaactgtgacatttttctcagaaagatctttatatagacggtctaagtcatttgagaagaacataagtgaaggcgtatttaggtttagttcaggttgcatcttcgcgattaacgctttatcgtgaaggacgatgcttgttcctgcttctttcgccggtgcaatttcaatccagcggaatccgtttccgttattttcttccgcaatgatttggaaccctactttttctgtccaaaattgtactgtttcgtcttggttatttacatatagcataatttgtccaacttgattaatcataggtgtctctcgctttctttttatatgcgtattattatatcaaatatatggcttgaatagttttttatgattttttcgtaatacaaccttcgtccatttcatctttgttgtaggagaaggccctgtaatccaagtatgaaatggtattgtgctacaaatgaccattgttgaaatagagataatggccgttaacacaaatagtaatagggcatataatatagtattttcttgcagtgtgaataaggaaagaagttttgtgcatagttgcaagaagaataaatgagctaaataagcaccatacgtgtaattaccaatgaaacgtaacgttttatataagaaaccacgacgctgtactatcataatagataacacatacagtatgataatttcgcatacgatatataaaaacatagatggttttaaataggtagaaacagttaaatgaatagagtttgctccgtaaaaactaaacaactcataattgatgaataaaaataagatgaaaaataatattgttataagcgggatatgtttcatgacgaatagacgccaagtttttagtgctacagcggcaatgccgcccataacgaaatagaatgagtagaatagaaatgatcgatctgtataatgtaaaattgttgaacttgttaatttttctccattaaaaatatagtgagaagagaaccacattaatagaaaatataggcaagcgaaaaaggtcatatatttatatatgtcttttttattttctgttcgtttttgaaaccaataaaaaagtgtgcatagtaaagggaacaataagtgaatttggaacatcataataacgtaccaaagatggggagcggctgttccgagtaataaactttttattccactttgtaacgtaataagattatttgttgttaataagtaaagaatagaccaaaagaaataaggaatgagtaagtgtatcgctttttcggaaatatattctttatatactaattgctttgtatagtgacgaattaagtgaaatccaacgataaatatgaatgctggtgctgagaattttgcaagattaaatagcatgcccataatgagggattgctcaagtaagacatttccttgattcattgtatataataaagaactttgcaaaacgacagcgagaaatgcaatgctttgcaaaactttaaattctggtgcgctttgtgtcattgtgtccatctccttttccatacatgattatagtacggagaatggataagaggtgtggaatatttgtgaaggttttaacaaatttgtggcggaatggattaacaacaaagaaagaggatgctcaaaacgagcatcctctttctatttattaagcaaatttgtttttgatccagttcttaccttctacaaggcgagctgtcattacggcacaagcgttatctgctgttacgtttaacatcgttgcaggaggatcaatgattgtactgattgctgcgataattggcaatgcttctggcgggaagccatataaagaaacgattaacatttcaccaatcataccgccgcctggaatagcgcccattactgttcctactaatagagaaacaacaagtgcgattgctaatgttttcggtccttcgaattccatgttgaaaataccgaataagaaagcaatttttaatacgccgcctaaaacagagccatctttatgaagagtagaaccaagaaggacaactgtttcacgaacgtctgaagaaatacccattttctttgttgcttctaagtttgctggaatacttgcggcactactacaagttgcaagtgatgtaactgtaggagagaccatgttcttccaaaatacttgtacaccttgtttgcgacctgcaaggtatgcatagaatgtgaagaatacaaagaaataaatgagagaagcaggatagtataccattgctgctcggaagtaagttccaagaagttgtggtccgaattcgccaactaatgctgcgaagtaagcagcaagtccgattggagcgtagtacataatgaaagatacaaccttcattgaaatctctgcaccagcttgtaggaatgtagcaaatggctttcctttttcgccaactgctgaagttgcaatccccattaagatagagaagaaaataagagctaacatattttcacgagatagtaacttcgagaagtcagatactgttaaaataccgacgatttgatctgcaacactaacagctttgccggctttgtcaggttgtgttagttctagtacaacaccttgtgctggcgggaatactttcacgacaataatcataaaaatagcagctaaaatacttgtaaataagaaagtcccagccatactagacataattttaccgaaacgttttaatccatccatattagcaatagacgatgcgatgctaaagaacactagaggtacaacaatcgtaaacattaagtttaagaaaatgtcaccaagcggctttaaagcaactgcatcggcacccatgaaataaccaatgaaaccaccaattaggatagaagataacaaaataagtggaaagcgatatgccttcataaatatatcctcctatcaattaaaaaaatcatactgaattattatagcgagttagcgtcctctttactaggagaatacggataaatggaatagcgtgaaaacgaagaaatttttgtttttaagctcggcatacagcaggaaatctagacatatatatttgtaacctagtggtggcaagggatgcaccataacttaggtagagaaaaagggggagggaagcgggataaatattttactttgctgtgcagcgggaatgtcttccagtttgattgttacaaagatggagaaagcagcagaggcaagagggatagaagtaacaatctgggcagtatcaggttctgaagtgaatagtcatattgataaagctgatgtccttttacttggaccgcaagtacgttatttattaccgaaaatgaaagaactatgtaaggataaagggatacctgttgatgtcattcaatctgttcattacggactttgtaatggagaagctatcttgcaagcagctttgttaatgaaaccatgaggagagtgggatagatgatacggtttttagagaagtatgtgatgccggtagcagggaaggttgcagagcagaggcatttacaagcaattcgagatggaattattttaacgatgcctttcttaattattggatcgtttttcctcattattagtgcactgccgataccgggatataacgattttatggcaggtttgtttggggagaattggcagcgagctttagggtatccagttagtgcaacttttaatataatggctttaatagctgtttttggaatcgcttacagacttggagagtattataaagtagatgctttagcatccggggcattgtcgcttgtgacgtttttacttgcgactccatttcaagttgcatatattataccaagtacaaaagaaagtgtacttgtagaaggcgctatcccagctgcattaatgggaagccaagggttatttgtagcaatgattattgcacttatatctactgaactttatcggtttattgtacaaaaaaagataattataaagatgccagagacagttccaccagctgtcacgcgttcatttgcagcacttgttccaggatttattgttgtaacagttatttggattttacgcttaattatagaaaatacttcttttggcagtatccataatattgtaggacaaattttacaggaaccgcttagtgtacttggtgctagtctttggggcgcgataatagcagttattctcgttcatgttctttggtcttgtggaattcatggtgctactattgttggtggtgtaatgagccccgtttggttgtcgttaatggatcaaaaccgagttgcttttcaagctgggcaagatgtaccaaatacgattacggcacagttttttgacttatggatttatatgggcggttctggtgcaacgcttgctctagttgtcggaatgttactatttgcacgaagtcaacaattaaaaagtttagggagattgtcaattgcacctggtatatttaatattaatgagatggtaacttttggtatgccgattgtgatgaacccacttttactaattccatttatattagttccagtcgtgctaacaattgtttcttactttgcaatggaatggggatgggttgcacgtccgagtggggccgctgtaccttggacgacacctattctttttagtggatatttaggatcgggcgggaaaatttcaggtgttattttgcaacttgttaactttgcgctagcattcttcatttatttaccgttcttaaaaatatgggataaacaaaaactggcggaagaaaagggggagtaaagaactacaatggatacgatagagacgaaagcttttcatttaatcttgcatgggggaaacgcgagaagttgttcaatggaagcaattgattgtgcgaagcgtggggagtttacagaagctgaagctaaattacaagaagcactagaggaattaaaggaggcgcaccgcgtacaaacggagcttatccagaaagaggctggtggcgaaaagaccgaagttactcttttaatggtacacgcgcaagaccatttaatgaatgcaattacggtgaaagaattagcgagtgagtttgtagagttatataggaagatgtcggtggatgaatgaaccttgcttatgcaaggtttttttatttcactaaatagtgggttaaaataatgaattatttttcattgaaaaagtttttttagtgttttttcatattaaacacaactagacgactaaacactaatctattttcatacagttatgtgttaaaagcgtgttgttttataacacactgtgtattttttggacgacacactaattgaaagcgttaacacacaaagaaaatgctcgaaaaagcactgattttagtggttttaaaaagttggcacgctaattgcattaataaatagcgtaaagaaaaataaataaacataaattttttatactacacaagggggattttcaaatgaatattttattatgttgttcagcagggatgtctacaagtttactagttacaaaaatggaagcggctgcaaaagctcgcggtctagaaggcaagatttgggctgtatctggggatgcagtaaaaacgaatatcgatcaagcagatgtgttattactaggaccacaagttcgttacatgctctcttcaatgaaaacgcttgctgacgagaaaaatgttggaatcgacgttatcaatccaatgcactacggcatgatgaatggagaagcagttttagatcacgcattaacacttaaaaaataattaggggggaagcgaaatgcaaaagtttattgcatttatggagaaatatttagttccagtcgcaggtagaattggatcgcagcgccacttagttgcaatccgtgacggatttatcgcagttatgcctcttattttagttggatcatttgcagtacttataaataacttaccaattgatgctttccaaaactttatgaagggcacatttggtgacgcttggaaagatgtcggtggcggtatgtggactggttcctttgctatactcgccctcatagtcgcagttgggataagttacaatttagcgaaatcttacggcgtcgatgcgttgtcagcagcaatcattacattcggtgcattaattattatttctccgacaacgccaaaagaaggcggtattgatttagcgtggacaggggcacaaggtctattcgtttccattatagtggctcttcttgtaacagaagtgtttagattctttgttcaaagggatattacaattaaaatgccagatggtgttccaccggcagtaatgaaatcattcgcagcgttagttccagcattcgttattttgattgtaacagcaggtattcaattagctgtgaaacttgcgggaacaagcattcataaaatggtatttgaaacaattcaattaccattacaaggtttagcgggtacattaccaagtgcaattattattgctctacttattcacgtattatggttcttcggattacatggtccaaatattattggggggattattgacccaatctatttaccagcattagagaaaaatatgaaattatttaatgatggtatgtctgcatatgacgtaccgcatatcttcacaaaaccattctttgatgtatacgtatatatcgggggatcgggtgcaacgttagcattcttagtggcagtaatgcttgtagcgaaaagtgcgcagcttcgcggtgtaggccgtgtatctatcggtcctggtttctttaatattaacgaaccagttattttcggtacgccaattgtattaaacccaacgttaattatcccgttcgtacttacaccagttgtattagttattacttcttatacagcaatcactttaggatgggtaccaaaaacagttgcgttagttccatggacaatgccaccaatctttagtggttatcttgtatcgggcggaagcatcgctggtgcagcactacaagtggtgaactttgctattgcggtagtaatttactatccattcgtattaatgtgtgaccgtacttatgtacaggctgcaaaagctgaaacaaaaggaagcgacaattcagtatcactttaaaaaatattattctggcgagttcctatagctcgtcagaataattacctttatatcatgttcaaaaagatgatactcatctacaagaacaccaaactatcattcataaaataataatttaatagacatgttcaaactgaaggggtatttaaatcggttgaaccttatagagagggcggtaattatgatgactacagcagaacaaattccattccaattgattttaaatagtggtaacgcacgaagctttgcgatggaggcacttcaatttgccaaacaggggaaaatggtagaagcagatgaagcgatggtaaaggcgaaagaagcgattaatgaagcgcatcatttccaaacagagctcatacaatcagaagcaagaggagaaaaaacagaggttagtgttcttttaattcacgcacaagatcatttaatgaatgcgattacagtgaaagaattagcagcagagtttatcgatctttataaaaagcttgaagcgaaaggggaataaagcatgactggaattaaaattgctacaatcggcggtggatctagttatacaccagagttaattgaaggatttattaagcgttatgatgagcttcctgttcgtgaaatttggttagtagatattgaggcaggaaaagaaaagttggaaatagttggtaacttagcgaaacgtatggtgaaaaaatcaggtttaccaatcgaggtacatttaacgcttgatcgccgtgaggcattaaaagatgcagacttcgtaacaacacaacttcgcgttggtttattagaagcacgtgcaaaagatgaagcaatcccattaaaatatgatgtaatcggtcaggaaacaaatggtcctggtggtttatttaaagcgttgagaacgattcctgttattttagatatttgtaaagatatggaggagctctgtccgaatgcatggttaattaactttgcaaatccagctggtatggtaacagaggcagttcttcgttatacaaatattcaaagagtagttggtctatgtaacgttccaatcggaattcgtatgggtcttgcaagattacttgaagtagatgcgagtcgtgttcacgttgatttcgcaggtttaaatcatatggtatacggactagatgtatacttagatggcgtaagtgtaatggaccgtgtgttagagcttgtgacagatccagaaaaacaaattacgatggaaaatatcgcagcgcttaactgggagccagactttattcgaggacttcgtgcgattccatgtccataccatcgttactactacaaaacacgtgaaatgttagaagaagaaaaagaagcttctgttgaaaaaggtacacgtgcagaagtagtaaaacaattagaaaatgatttatttgagttatataaagacccgaatttagatattaaaccaccacaattagaaaaacgtggcggagcttattatagtgatgcagcatgtagcttaattacgtctatttacaataataaaggtgatatccagcctgttaatacacgaaacaacggaacaattgcaagcttaccacatgattcagctgttgaagtgaactgtattattacgaaagaaggcccaaaaccaattgcagttggagatcttccagtaccagttcgcggtttagtacaacaaattaaatcattcgagcgcacaacaattgaagctgctgttacaggggattatcataaggcgctgcttgctatgacaatcaatccgcttgtaccatcagataaagttgcaaaacaaattttagatgaaatgttggaagcacataaagagtatcttccacagttctttaaaaaggtagagaagtaaaagcggcgctatttagcccgctttttttattctattaggaggtattatgatgattaagttaattgtaaatgcagatgatttcggtcttacagaaggtacaaattacggcattattgatggtcatataaatggacttgtaaattcaacgacgatgatgatgaatatgccaggaacagagcatgcggtacgcttagcgaaagagtataacctactcggagtaggcgtacatctcgtattaacagcaggggagccacttcttggagacgtaccatcacttgtaggtagcgacggatcgtttcataaacaaagtgttgtaagggaagggaatataaatccagaagaagttgagagagagtggactgctcaaattgagaaattcctatcttacggattaacaccaactcatttagatagtcatcatcatgtacacggattaccgatcttacacgatgttcttgagagattagcagctaaatataatgttccaattcgtcgttgtggggaagatagagcggtgcatccattttctgatgtattttacagtgacttttatgcggatggtgtgacggaagattactttatgaagttaaaagaaagagtacaaggtgaacaaacggtagaaattatggttcatccagcttatattgatccagagcttgtgaagcgttcttcttacgtaatggatcgtgtgaaggaattgcgtattttaacagagagtgagttgcctgaagggatagaacttgtgaagttttaatagaaaaacgacggctacatcatgccgtcgttttttatttacaaaatggatagaatatatccgccaaaagctccaagtataacgataacccaaggcggtgctttccaaaaagctagtaagcaaaaaagaagcgaagcgaaaacgaaatctgaagcatttataattgtactcgtccaaatgggatcgtaaaaagcggcaattaaaataccaacaactgcggcgttaacaccaagtagtgcgccttgtatgaatgatatttttctcacattgttccaaaatggtaaaacaccaataacgagtaagaaagcagggaggaaaatcgcaattgttgcgattattgccccaagcgtcccgtttaacactgctcctatataagaggcgaatgtaaatagtggtcctggtactgcttgtgttaatccgtatccagctaggaactgttctttcgtcatcattccgttttgtacgaactcaccttcaagaaggggcagcacgacgtgtcctcctccaaatacaagtgcgccagagcgatagaaactgtcaaataaagcgatgtaataagagaacggtcttaatattggtagcagtagtaatagtccaaagaataagacgaggcaagaaactgctatcttttttgaaataggtactcttatattttgagattggctaattggttggttgcgatataaaaaccaaccgataaagccacatattataataaggatgacttgtgtccaactacttggccataataaggcgattgcggcagttacaatcgcaatcgttgcacgatttcgatctggagttaactttcgcgccattccccatatggcatgagcgacaatagcgactgctacaagttttagtccatgaatccagccagcacttccaagatcgaactgattaaggaatgaggcgaagaaaaccaaaacaagcacagacggtaaagtgaatccaatccatgaaataatagctcctaatagaccgccccgtaataatccaacccccataccgacttgactgctggcaggaccgggaaggaattgacatagtgctactaaatctccatagcttcgttcatccatccattttcttttttgcacgtattcgtggtggaaatagccgagatgagcgacaggaccgccgaatgaagtaagtcctaatttaaatgagacgagaaaaatctctaataatgtatgaaaagtgtatttgttagttttcaatggaacctcctataatgtttttctatgtgcattatacaagagactttcaatctacaggaacaatcacaatgtaaagattttgtgaatcttttctttgtaattaaaattgaaaaagtcataaatgattatgtttaaaccataaagtagtagaagtagtgctgggaaatttatataaggagaatgccttatgacaacacatttctttgccaggttaacaggtaagagggaagtgcctcctgtaaatacagaagcttttggggtagcagagtttatttttagtgatgatttaacgaaattgcattacagagtaatactaaaaaatatagaaaaggttacatcttgtcaaattcatttagggaagtctactcaaattggtcctgttgttttatatttgtatggtccactggagcaagggattagcttgaacgagggaagtattactggtgtagtgaatgtagaggattttgagggacctttacaagggaaatcattcgtacatttacttcaagaaattattcaagcaaatgtatatgttaatgtccatacgaaatcacaaaaaagaggagaaataagagggcgagttagaaaagtaaagaaatagaggcaaaggctgtccatatgttggaacagccttttctcattatataaggtgctagttttagcaattattgtcggtaaatcgatatattttgaaaatcgctgatataatctgagttacgccgatatattttgaaaatcgctgatataatctgagttacgccgatatattttgaaaatcgctgatataatctgagttacgccgatatattttgaaaatcgctgatataatctgagttacgccgatatattttgaaaatcgctgatataatctgagttacgccgatatattttgaaaatcgctgatataatctgagttacgccgatatattttgaaaatcgctgatataatctgggttgcgccgatatattttgaaaatcgctgatataactcacgttacgatcgatatttttaaaaacggcctcgattaatttttcacaggctgatttttaataaagaagtccataacataaaatacttcgtcatcaggtatttgtatttcaaatgtgttttcaattggttgcaacgctttttttactttcatatacatccagtactcatcttgtcttcttttctctttatcagggtgaggaagaaggctttctcctttttgaagacggtcaaccatacagctcatatgcagaataacacccattaagctatcaggagttagctgtaaggaaattaattcctgaattgtatttaatgcgtaacgaattgttttgataagtaatgctccatcgttacgctgcatttgttgttcaagaatatccgccatttttgcatatgtttcttcatacgtaattaattcttgaattggctgaatcgctgtgtagtttacgatgtcttggaaatgatatgttaagcatggtacttgcacatcgaaattcgtgacaatacaaatgatgttacgctctttttttatgttctcaatcattttcgttaaatctttttcatggacgatactaattggaataatttcaattaagtctttatcaaatcgtaaatagttctctaacattttttgaatagctaaagcacttccttcaccagttaagcaagctgttaaaataacagatttcattggagagagaggttttttcttttcttcttgtacgtttaagtaaaatggtgttaaattttttactgtttcatacagcgcatctaatgaataaccgagctgagcttttcgagctgcttctagtgcgtgtggtgtgctcgtcatcgagagaacacgtacagggattttgaactccgtttctaatatgtcaccgatataagcaagtgaccccatatcgacaagtaagagaagcccatttacattttgtagtgttttcatatacactttcacacgttccaagaaatctttcggtgattcgtgtaacggcatatcaataccggttacttcctcaatgccgagaagttcgtttgcgacgtttgccatttcagttgcgatgccattaccgtgtgctaatattaatacttttacttctgtttgtgaggcaggaattggatcaacaacgaagaacattgttaaaaagccagcttcatcaataggcattgttatttgtaattcttcctccagtagttgaatgcattgcatagctacggaaaaagcttctttatatttcgtacgaatttgatttaattgtgggtgatgtatttgtttgccgctttgtaaacgttgtagagttgtctgtacatgtaaacttaaagcgagaaatactttttcatcaaacgtcttagataaatgcttttcagcaagttccgctattttttcacatacggaaacgatattacgatccacaattttaaaaacattttcatggcttgttttttttgatatttggttaaaatattgtacgaaaaagctttgaacatcattttctattagtaattctaattcttcctcttcaataccacgtgcttgaagttcttcgtatttataatcaatataatcgtaaatagaagagcgtttttcatcttctgttttatgattactccaaccttcctcacctgtaaatacaaatgtttcatttggtatttggtataagtgacggctcttcctttcaatgaacaacccttctttcatataccaaggtaaatctgaacttgaaacatagacagaatcacgtttctttgtgaccaaatcagaataggctttcgcacaggcaatttgaacatctgtttttaattgaccaatgttattgggacaattgtaaaagacgaaagcacgcattgcatttgggctaacgtgaatgtcttttcgcagacgaattgcttcatttgtgaaaaatcgctgtagtaaagcaaagcgctctttatgtgtacgctcacgaagtggtggcagcgtaacagtcattggtatacgtcttgtaaatgtttttaataaaaatgaatttggttcttctgttgttgcagtaatgattaatacttgtgctttacgttcgttctctgtttctccaaggcggcggtatactccgcggtcaataaaggtgaaaagcatttcttgtccctctggaggcaggcgatgtacttcatctaagaaaagaattccttcatgtgctttttcaattaaccctttttgatcacttgctcctgtataagctccttttttaatcccaaataattgcccgagtagtaactgtggattatttgcataatcagcacagttaaatacgataaatggtgcatcttttggaagctgttcaacttcaattgcatattcgtgcattaaagaagcaaacatagactttccgacccctgtttctcccagtagtaaagtatgcataccgtttggaggatagagaatagaagctttcgctttttcaattgcaattttaaggctcgtattttcaattgcaaatgtatctaatgaagttatgtcttttgaatgcgtttccaacgaagtgttcgtttctatgtaaaaacgaacaggtcgcgtatttgtttttaataaacgtttatcttttacaagtttgtttaaatcgctacttacattggcgcgatctagttgcagaaatgtagcgagttctgatgcggttacaccttctgtataattgcctttttgtattgcgttaaaaatgagatctattcgtttcatttctattcacctcgaaacttcatcactatttaaaattttacacaaaaatgggaagggtgggaagagaaaaataaaacagctttagcacataggcgctaaagctgttacaatcttgtgtctttccaaaaattcactttgagatgagaagaaggattatagggaagaagtttgtatccttgtgactgtaagtaatcaattacttttggcagtatttgtacggttacactcgaatcatgcattaaaatgacttcgacttgttcatcactttgattacgtactctttcgagtatggcagaaggattgtcatagcttttccagtcgtatgtatcgatcgtccaatcccacattttatactgggccgatacaagtgcgtcacggtaattcttttttaaataaggcatactaccatatggaacgcgaacgagatgtgtatttaatttcgtaacttgctggacaatgctttgtgtttgctccatttctgcaattaaagtggaagggtcaccagtgtaaaggcgttttacatcatgtgacatgctgtggagcccgatataatgtccttctttaattaatcgttgcatcgtttttgtgtaatgtggcacttttccgccaataacaaagaaagttgcttttccgttcttttcttttaagatgtttaaaatttgtgtagtatatttgtttggcccgtcatcaaatgttaagtacgcaattttttgtgtaggagaagttgtttcagtatttggatgatattcagcaggaataacagttgttgcttcagtattagatgatacgtacatagtaatcgttaaaaataaaataatacattgaaatactcgcttgatcataacattcaccctcagtttgacaatcaagatgtaaaaaagaaaacttgatacttttcttattatgtatagctttctccaatagaggaactctcaaacaatctatattttggaaatataaaatgagaataaaaaatagcatcctcttataagaaagaggatgctatttgaatatttcataattgaaaaggctatactacaattagtcttcgcgttttttcacttttttataaaaggaaatgattggtttgtagcgttcatgtacaagcccgattatttcagcgatgatttctgtgaagaaaatcaaagcgaaaagaagaataatggataaccataacgttgcactagtgaaaataatggcatttacactaaagaaaataccgaatgcgtatataattagtaccgttttgcgatgagagaatcccattgcaagtaagcggtgatgtaaatgcgatttatctggtgctgaaataggttttttatttacgatacgacggatgattgcaaatatcgtatcaaatataggtacacctaaaatgataattggaacgataaaactgaataacgttacacttttgtataatccaagtaacgatataacagaaatacagtatcctaaaaatagtgctcctgtatctcccatgaaaatttttgctggatggaagttgtagaataaaaatccaattgtacttgctaatataattaatgcaagtggcaagataatagctgttccagtaccccatgggctagtgaaggccatatatgctagcgttgcaagtacgatagatgaaatcccagcagataatccatctaagccgtcaattaagttgattgcattcgtaatacctacaagccaaaatactgtaattggataagcaagccatccaagttcagtatccccaaggaatgggatatataatacttgcactaataatccactttttacaatcatcatggcaactaacagttgcccaccgaattttactctcgcagataactcgtacatatcatctaaaattccgatgattacaatgataatcgcacctagcgttatcgataacattctttgttcatataagccgccgacaacaaatcctacagctacaccaataaatattgccaacccgccaagacgtggcataatcttttggtgcactttacgtgcgtttggcttatctgtcgctcctattttaaaagctaatttaataactaaaggagtaacgacgagtacagtgatgaatgatgccaaaatggcataaatcacttgtgagtccattaataccccaccctttatagtctaacgtaatttttttttgaaaatatatttatctgaaaattatgatgtttatttacaggctcataacatatggtatcacaaaaagattagaattcaatctttttttctttttacggttaatggaaacggatagaatatatgacaattgtatatagaatgttgaatcatataagaaggttaattgtactgggctttggaatgtaacatttcctctttttcttcaatagtgaatacttttatttcagtattataagtgttgcacctagaaatgagtaagtttcgtgttaaaatgtgggaatttatcacgcgtgaactggcagccggattctcactgattaagttttactttatagtgcatttaattttacaaaaactttaaaaaaaataagggaagtaattcatataatgaagaaggaaaaggtttttctcatttttaatatgagaggaggaagcacaggaagagttctatatttcatatcttttctattgtaaattcctgtgcgaaaaggaaatgaaaattacgatagtaggtactggatatgttggattgattacaggagtaggattggcaaaattagggcattcagttacatgttttgatatagatgatgaaaaaattgaacggataaaacaaggggatttacctatttatgaggccagattacatgaattaataaattatgcatatgagaataatgctttaacttttacatcaaataaagaagaggcatttgatgatgtagagtttatatttattgcagttggaacaccacctttattagatgggacggcagatttaacgtatattcagagtgcttgtaacgatattggattatatgcgacgaacgatattattgttgttacgaaaagtacagttccagtaggtacaaatgatgtaatgaagggatggattgaggagaagttaaaagggaggcatacagtacatatcgtatcgaatccagagtttttgcgtgaaggttcaggtatttatgatttctttcatggagatcgtattgtaattggagcggatagtgaggaagtagcaagaagagtagagagtttgtatagtgaattatgtttagaaacgtatgttacagatattaaaagtgcggagatgattaaatacgcgtcgaatgcctttttagctacaaagattagtttcattaatgaaatttcaaatatatgtgagaaggtaggcgcgaatgtattggatgttgccaaagggatgggaatggataagagaatcggtgcatcttttttaaatgcgggcattggctacggagggtcgtgttttccgaaagatacgaaagcactggtacaaattgcgggaaatgttgctcatgattttcgtttgttaaaagcagttattgaagtaaataataagcaacagctgctattgattgaaaaagcgaaaaaagttatgaacatgaataaaaagcggattgcagttcttggcgcatcctttaaaccgaatacggatgatattagagaggcatcatctcttattataatagaagcattaattaatataggtgcagatattgttctttatgacccaaaagcaattcaatatgtaaagaatatatttggagatgctatacaatatagtagatgtatagatgaatcgattagagatgcgagtgcggtttttatcgtaacagaatggggagatattcaaacgtatccgttagaaaagtacgtacaacttatgagggagcctattttatttgatgggagaaattgttatactgatgaagatgttaagaaacaaaagatagattattactcggtgggaagaaaaagtatttgtaatagaaaagtttctgttatgcgttaaaaagggatgtactcatgcatatttttatatgtcataatagaagctgtaattagtgaaagaaaagaggcaatcacatgactgaacgtttaaaagtaatgacaattttcgggacacgtccagaagcaattaaaatggcacctcttgtattagagttgcaaaaacacccagaaaaaattgaatcgattgtgactgtaacagcacaacatcgccaaatgttagatcaagtattaagtatctttggaattacgccagatttcgatttaaatattatgaaagaccgccaaactttaattgatgttacaacgcgtggtttagaaggtttggataaagtaatgaaagaagcgaagccggatattgtacttgtacatggtgatacaacaacaacatttattgcaagtttagctgctttttataatcaaattccagtaggtcatgttgaggcgggccttcgtacatgggataagtattctccatacccagaagagatgaatcgtcaattaacaggtgtaatggcggatcttcatttctcaccgacagcaaaatcagcaacgaacttacagaaggaaaataaagatgagtcacgtattttcattacaggaaatacagcgattgacgcactacaaacgactgtaaaagaaacatatagtcatcctgtactagagaaacttggaaatgatcgtcttgtacttatgacagctcaccgccgtgaaaacttaggtgaaccgatgcgtaatatgttccgtgcaattaagcgtcttgttgacaaacatgaagatgtacaagttgtgtaccctgttcatatgaaccctgttgttcgtgaaatagcaaatgaaattttaggtgaacataaccgtattcatttaattgagccgctagatgtaattgatttccacaatgttgcagctcgttcatacttaatgttaacggattctggtggtgtacaagaagaagctccatcacttggtgtaccagttcttgttcttcgtgatacaacagagcgccctgaaggtattgaagcaggtacgctgaaattagcaggaacagacgaagagacaatctttggtcttgctgatgagctgttatcagataaagaagctcatgataagatggcgaaagcatctaacccttacggtgatggtcgtgcatcagagcgtattgtagaagcaattttacagcactttaataagtaaataaaaaaggcccaatcgcatagattgggcctttttgttacggctgattgcgcataatccactctgcatgagcatttgtagaaggtggcggatcagttggtgttttattttggtttgttgctttttttgtttgttcgttagaattagaacttgaatttgaatcaggatttgaattgttttttgtagttgggttttttgctttttctcctaattctttttcaatttcgttacgcaccgtttcgacactgattggatctggaaggaagtaataaataccgcctatctttttgtcttcgccttcaagctttaacgtttgtattgtagaaggatcaaatccagagagtttattgtaaagagcaagtccgtctgaaataggaatgtcggtttttatatattttccaactacagtcgttaaatctttaattttaaatacagtagaggtggagtttagcttttgggcaacagcggccagtaattgtctttgtctagcagcacgaccataatcgccatttggatcttgctttcgcatacggacgtaagcaagtgcttcttcaccgtttaagttttgctgtccttgcttaaattgaatttttttgtagtaatccacgtcagagcgctcccaaaaatcgaagggtacgtcaacggtaacaccgccaacagcatcaacgatacctttaaaaccttggaaatcaattttaatataatggtctacaggaacttttagaaaaccttctacagttttgattgccatttcctctccaccgtaagcatgagcggcattaattttgtcttcttttccctttccaacaatcggaacgcggctatcacgaggaatgctcataagtgaaacctttttagttttcggattgactgttgcaaacattaatgagtctgtacgaccattttgaccatctgtcgcataatcttctatacccataatgagaattgtaaaaggttcctttgtaatttctacatcttcgtttcttaaatccgatttttcacgagtaaaaccactatacatccccataagagaagagtaagaatttaacacataaactcctatgctgccaaataaaaatgcgaaaataaggaagaagaaaagtttccttcttcgcttcttttttattctgctattttggagatgataataacgttcttccatatataatctccttagttcgttagttcatttgtagggaagtaattcactacattaatctttgaaggtgataaatgggttattcttagataacatcttgttctaagtacaacatatctccttctgtaattgtacatttcccgtttgttaattcaatcatccaatctgtaaatgcttgtttgccgtcttcttctacatacgtatcaaatgtgacattttctagataatgaatatctttaatggcatattttgaattgcgtaattcattttccactttgccaagtaatgtgtaatcaatctcggtttgcatcacacgcattagttttcgctgaacaacaccgacatgattaatgccttcgcttgtacactttccatatgcacgaattaatccacctgcgccaagtttaatgccaccaaaatagcgtgttacgacaacaacggtatcttttagtccacgttttttaagtacctctagcattggtacgccagctgtaccgctaggctcgccgtcatcatttgctttttgaatatgatcttgttcgccaattaaataagcggaacaattatgtgttgcattccaatgttgtttttttattttttgtataaattcttgagcctcttcctcagtcgttgctcggctaatataacaaataaatcttgatttttgaatgacgatttcgtgttcgccgtagtctttgattgtaaaatattgtaatagcaattgtgtacgcccctatctatcaaaatgactagtactttccattttaaaagcgagcctttttatattcaaacattttttctaaatatgctgaagtttttggtgagtattttatctttttgttgtaatttgtcgagatggtaggtataatttcaaccggcattttcatgtatggatgcaccatttgtagttttcgtgtaaaattaggaaataaaactttttataaggcaggtacgaaaatgaaaatagctattgttactgatagtacggcatatataccgaagcaaattcgtgatgaactcaatatatatatgattccattaaacgttgtgtttggaacagaatcttatcaagaagaagctgaaatttcagcagatgatttttatgtgaaagtacgtgaacaagaggaacttccaaaaacttctcaaccagcaatcggaaagtttgttgagctatatgaagaactagctaaagattatgatgcagttattagtattcacctatcaagtggaattagtggtacatatcaaacatcaacgacagctggacagatggtagaaggtattgatgtatacacgtatgactctgaaattagttgtgaagtacaaggattttatgtgcgtgaaggtgcaaagttagcaagtgaaggaaagaatccaaaagagattatcgctcgttttgatgaaatgaagaaaacgatggacgcctattttgtagttgatgatttacatcatttacaacgtggtggtcgattaaatagcgcgcaagctttcatcggtagtctgttacaagtgaagccagttttatattttagagataaaatcattattgcgtttgaaaagattcgtacacgtaaaaaagcattaaaacgtatcattgaaatttttgatgagcaagcaagtaaaggtgtacctatggaagcagttatcattcatgcgcaacgtgaagaggaagcgaatgaatggaagaaagaattagaagcaaaatatcctcacgtcacaattcgtacaggttattttggggctgtaattggtacgcacttaggtgaaggtgcattaggtcttggatggtatacgaagtaataaagatataaaaagctctctttttaagagggtttttttacgggtatgttacgtttagttgacaagttaatatttggaaatggtaaaatgtacgtaaaataaaataatgaggaaagttttataacttactttttacaagaaactatattataatggaagagaggtgaaacatatggagcataattcttgtttatgtccaaagtttgagtcagcttttactctgcttagtaagaagtggactggcttaattattaaatctttgcttgaagagtcgaaacgttttagagaaatcgcagatattatcccaaatatgagcgatcgtatgttgtcagagcgtttgaaggaattggaaagcgagggcattgtagttcgtaatgtctatccagaagtaccagttcgaatcgagtatggcttaactgacaagggaaaagcgttagaaagtgttatggatgaggtccaaaattgggctgagaaatggatgaagtagcatttcatctgtattcgtatatttaataaaacgtaaggaattccttacgttttttctttgtttatagaagtgagaaaagtatataaatttctacacatacatacaaaaatatacgcattttgcgctagagctacatataatattacatttgttttacaaaaacgtaacattagcaaaaaaaatcccgaattatggtataaattttataggttatatacggaaaaagaaaaaagaaagcggtgtaaaaaataaaatgaaaaagctaaaaatggcatcttgtgcattagttgcaggattaatgttttctgggctaacaccaaatgtatttgcagaagataaaatttctgatgtgaaatcacaaattaacacacaaaatgacactttacataaacaacaacaagaacgtgatgaattacaaaaacaaatgaatgacttaaacaaaacaattcaaggtttagataaatctgttcaagagaatgctgcaaagcttgatgaaacaatgaaaaaagtttctgatactgagcaattaattgaaaagaaaaataaagatattgcagaattacaaacaaagattgcaaaacgtgaagagctattaagaaagcgtttagttgcacttcaagaacaaccaaatacgaacgttgtaacagaagttcttgtaaactctaaaaacgttgcagatttagttgatcgtttaacttctgtttctaaaattcttgagtctgatgaagatatcatgaaaacacaacaagaagaccaagctagtgtgaaaaaagatgttgcaacggtaaaagaaaaacaaaaagaattaaaagaagcacaagctcaaattgaaactgctaagaaagaacttgacgctgaaaaagagaaaaaagcaacagcggtaaacgatttaagcggtaaaatggatacagttgtaacttcaatgacaagtacggaaggtcaattgaaagagcttgagaaacaagcattacaattacaacgcattgccgaagaagaagcacaagcaaaagctgcacaagaagctgctgctcaaaaacaagcagagcaagctgctaaagctgcgcaagctcaaccagcacaagcacctgcagagcaagctgcaccagcaaacaatggtggacaagctcaaaaagaagagcctaaaaaggaagagcctaagaaagaagagcctaaaaaagaagcacctaaacaagaagagaaaaaaccagctccaaatgtgggtggcgtaattggtaaagcgcaaagctacttaggtttaccatatgtttggggaagtgcatctccatcaaacggtggttttgactgtagtggattcatttcttacatctttggtgtaggtcgtcaagacgttaggggttactggaactcagtttctaaagtagatagcccacaaccaggagacttagtattcttccaaggtacttataaagcaggtccatctcacatcggtatttacgttggtaatggccaaatgatccatgctagcgataaaggaattgcgtacggtgatattaacagttcgtataaccaaaaacatttcttaggatacggtcgattctaggatttataaaagaataaaaaccgtgtataaagtcgatagcttactattttataagtaggttatcggcttttttgagtttttacgagatgatgagaaaggtttatagtagtgctggaggtgattgttgatgctagcggggaaacagttgctattagaagaactttcttcagatttacagagggaattaaacgatttgaaaaagaagggagagatcgtatgtgtacaaggtgtaaaaaagaagaattctaaatatatgtgccaacgctgcggaaatgtagatcggcggctatttgcgtcgtttttatgtaaaaggtgcagtaaagtgtgcgcatattgccggaagtgtataacgatggggagagtaagtgaatgtgctgtacttgttcgcgggattgctgaaagaaagagagaaaagaattcaaatttgttacagtggaacgggacgttgtctactggccagaatttggcggcgcaaggagttatagaggctattaagcaaaaagaatcattttttatttgggctgtatgcggggctgggaaaacagagatgttgttttacggaattaacgaagcgcttcaaaaaggagaaagagtttgtatcgcaacgccgagaacggatgttgttctggaattagcaccgagattgcaagaagtatttccatatataaaggtagcggctttatatggagggagtgtggataaagaaaaagatgcagtactagtcgttgcgactacgcatcaattattacgttattatagggcgtttcatgtcatggttgtagatgagatagatgcgtttccatattgtgcagatcaaatgttacagtacgcggtaaaacaagcgatgaaagaaaaagcggcgcgtatttatttaactgcgactccagatgaaacgtggaagcgaaaacttaaacaaggtaaacaaaaaggtgttattgtttctggacgatatcatcgtcatcctttgccagttcctttattttgttggtgcgggaattggaaaaaaaacctcattcataaaagaattcctcgagttttactacagtggttacaaacatacttaaataaaaaattccctatttttttattcgtcccccatgtgcgatatatagaagaaataagcttgttgttaaaaccattaaacaatcgaattgaaggtgtacatgcagaagatccagggagaaaagaaaaagtagcggctttcaaaaagggagaaatcccattattagttacaacgacaattttagagcgaggcgtaacggtgaaaaatttgcaagtcgcagttttgggggcggaagaagaaatgttttcagaaagtgcgctcgtacaaattgcgggccgagcagggcggagctttgaagcaccgtatggagaggtcatttattttcactatggcaagacagaggcgatggtgcgcgcgaaaaaacatattcaaggtatgaataaaaatgcgaaagaacaaggattgatcgattaatgcattgtttactttgtgatgagtgttttgtagaaaagattagttggtacactttttttgtaaagtgtcatagaaaatatatatgtgatagatgtgagcagaaactttcctatattataggagaaatttgcatggagtgcgggcgacctttagaatttgttcctgccgcatttcaagaagacggtatttgtatagattgtataaggtggacgaaagaggagaagtatcgttcttttaaaaaccgttcgttatatatgtatgatgatgagatgaaagaaatagtagcacagtttaagtttcggggggatgcggagttagtgcacattttttatcgtccttttcgaagtttatttcaaaagtattttgccaatgtttcaaccgttatcgctgttccgcttagtaaggaaagggaaattgaacgtggttttaatcaagctgagttattagcaacttgtttgcctgtcaaaatttcttatccatcattaagaagaagggaaacagaaaagcaaagtaagaagacacgtaaagaaagggtgtcaggaagcaatcctttttattttcagggagaagagatgttttctgagcaacatattttactcgttgatgacgtgtatacgacagggattacagttaggcaaatcggaagtttgttatatgaaagaggggcaagagaagtatctagtttgacactttgtagaagttaatatggcagtgtcgaaagggataataaaaaggcgataagtcttctttgacttcatatgttgtcattcgttatagtcaaaatatggggcgaatgccctgatttttagagtgaagggaatggaatgaacatgcaaggaagagtgaaatggttcaatgcagaaaagggatttgggtttattgagcgtgaagatggtgacgatgtatttgtccatttttctgctattcaacaagatggatataagtcattagaagaagggcaacaagtagagtttgacattgtagatggagcacgtggaccacaagcagctaatgttgtgaaactgtagggtatattgtttttggaagagaaagctgcgtttgtggcaacgttatatatatgtagtagaacctcttgtttttcgcaaggggtttttgttatagtgtaagttgtcaaaaagttgtttcttttctgtaacgaattgtccacagttatattcgttactcacgatgttaataggataaaataaagatagaaacgatgcatcttttcatttcaacaaaaaacgataaaaaaatcgcaattccactaatttttttaaaaaagttagaaggagtttttaagccaatgtcgaaattataatacataggcttgaaaggaggaattcatctatgaaattcaacattcgtggtgaaaatattgaagtaactccagcattaaaggaatatgtagagaaaaaactaagtaagttagagcgttattttgatacattcccagagattaaagttaatttaaaagtatactctgacaagcaacgtgtcgaggtaacaataccatttactgatttattacttcgtgcagaagaaactaatagcgatatgtacgctgctatcgatttagtagttgataaaattgagcgacaaattcgtaaacataaaacaaaagtaaatcgtaagttacgtgagaaaggttctatgaaaacgaactttatccttccagaagcagtagctgttttggatgaggtagaagaagatgaattagaacttgtacgtacaaaacgattcgatttaaaaccgatggacgttgaagaggcaatcctacaaatggatatgctaggacataatttcttcgtcttcacaaatgctgatacaaacgaaactaatgttgtatatggccgtaaagatgggaaatacggtttaatcgaaactaaataataattcgaaagcgcagccgaaatggctgcgctttttttgtatttttcgcagcaaggttaaaaaagttttataagtagccgatttcattaagaagtgatttttaggcggtatttcctcaaaacagcaggagaaaattcgaaacttagagaggtgagttactctttattatttggaacaggcataggaatgtagctacctttacaagtaattctttgctagggatatagtattgtttttaaaaatttaacgaaatgttcgcaagtgtaaaagtaatattaaatattctgaaatccattgaaggtgtgttgaggtgttgttaccataatattgtattatattgattttgttccttcagtggaaaaatacaatcaatataatgctacaaattatcggaggtgcttttagtgggcattaagaaaaaaagtcgttttatgtttggatctgttttatcgttaggtattttagctagtactttcgctttaaccgaaccggctaaggctagtacaagggatgaccatgtgaattttacctttagactttggagtccatatgattatactaatgcacgtcctaaagagacgcctacctctatgtatatgcgtgtgaagagcagtgagaagggcggaggttctttcaatgtttggacagaagcagataaaaataaaaatgcagaagatagaaaatgggtaaatgtttcaggtaagcatgaaggaacagtgataccaggtagaacatatctttttcaaaattatgcatatgaaaaccatgggaaaaatgtgcctgtgagatttggtggttattctagagaaaataatgcttatcctactgcttggagtcctgatagtgtaagacatagtggaccttacattgaatattgatttagaaattataaattgaaattatttattttatagtgctagaaaaagtcgtatagtttcaaatccggattatacgacttttcctgctatttcatttttaaaataggaggagctgtaatgaggtttatttcaaaatatattttagtttgtttttttatattgagtattagtttcttagtttcttgtcaaaagaaagtagatgaacctattgtacatattgaagatactttaacggaaaaagataatttgaaaagtattgaattaaaaggaattaacaaaaatactatttttgaacaagtgtttttggaaagtgaaaatggtgatgatttctttcaaggacaaatagaaaaaaatgatagtttaatagaggataagctttcaaataaaaaattgaaattaggagttataccagaaaattattatgtttttttgacgggtgttacgaataagaaaaaaccaacgtatctcttgggacggattgaacaaactgatggagaagtaattcagtggaaacaagaagttaagagtgtaaaaagaaaaggcacaaatgatgtttatcagtatgaagttgagtttcctaaatttgaaggagagagagcaaatgtttcttttcgttacatttggttaaataaagaaaagaaatgttatggtgttgcggatcaattgttcatattaaaaaagatttaaatttaatggtttatggaggagctatagatgagttactttttaggaaggattttaaaaggtaggatgttttggttgtctttatttattatgttagtaattgttattgctcaatatattgctatgtttgtgacaactaaaggatttaacgatgctgggattataaaggtatccccatatttatctaatattttatattttaatagattatcgttttatagtgagttttatttacttatatttcctatgctttccgcaatggctgtagcagggatttatagaattgataaaaattatggatttatttatcctgttatttctaagatgggaacatgttattattttaagctgctttattttattaattttagcgtatctttttttattataagtgtccctttactatttaatttttatttatatgtgatgacttatccaacagttgctccgcatccaatattaaattatatggcttctactgtttcgccaacagctcaatttcatatagtttattataagtaccctactttatattttctaatgtatgtatttttaaatggtttatacggtgcggttttttcgagtttagctttatcagtttcgttttttataaaacgagtttattttatttatttagttccatttattttacatattttttggcttggtattggaaaagggattctcaatcctaaagattatttaattaaagattttggcttttttgaattgcaaatttttcttagtgtactgttatgtatttggttttgttctgtagttctttatttacgggggagtaggaagcatgttcttttataatgttatgaaagaaactataaggatgaaatatgtttggttaagtattctttttgtacttaatgttagtatcattggttgcttgttcaattattttgaacccggaattgtaaaagagaaaatgaacgaattggaagctttgtataaggttatttcgttgtataatttgtcgactatatttattcctttaacaattgttttttctgtatattctatgtcgaacttttttagtatttatgttgtttacagagtgaataatgcattgaaattagtttctatatattatttaaaattattcgtttttgtttacttttttgctgggagtatgattttacagttgtttttgatgtcaactatgatggctgtaactagtgttgatgtaaattatccattattattttgcattcaattatttgcgagtgtttttatatgtatgataagtgctttattgcaattatttttacctagtttacttgtaataatatgtatgattactgctgttttattagatagatttatattacatggatttttatttacaaatgctttttatataaatgtctttgaagatgctactggtttatttatacgcttatttggctgtttttttatcttttttataagtgtatggattttatctaaaaaaagttatatttctatgaatgatgagacagaggtggtctagtttacattatgatcttatattatttgttaaaaagagatttatatgtaaggtttcgagattccatcaagataatggtttttttattcttaatttacgctattattgcaattgcctttttatacaatcagcctcttagtaatggtaaagaatctgtattagtagatgttaccttttatcgattttttcatggagtagattttgtggatttatcttatttttataaggaggggcgattttctatccctttttattggatattctttcaaatcactcctttgttgcttgtagggaattttgctttttcagatattcaacagaatggtgtttatttatttcctcgtgttaagaagaagcattttctgtggttaacgaaaatattatctttgtttttttatataattattatttggattggtatgtattttatttggtttagcgcttactatttgctttctttaggcgagtataattttttaaatttatatagtcaatttccttataagatattaggtactatgctaattcaaataattataagctttttattagctttgatttttgagtttttaactttttatataccgataactattgtttttgtactaatgttgttgtacctatttttgtctattttctttcatagtatttattttttaggctcttttgttatgccaaatcgttggtattttgttgatcacagttcaattcaattgactttaggtaataatcaatctattcaatataatgatttacttttaataggagtagtaattgttgttgtaatgattttattaggtagtttttgttttaaaaaactagatgtgataggtgaataatttatggacaattatattaaatgtgaatgtatgacgaaaagattaaaaggaaatattgtgttagataatattagtttgtcagtaaaaaaaggcgaatttttagttttgaaggggcataatggctctggtaaaacgatgattttacgcgctatatcagggttaatgcgcttgaattctggagttgtttatatagataatgaaataattggaaaacaaaagcaatttcctgattctatgggaatattgattgaatatccaagttttattccagggtatactggttttcagaatttgaaatttttatcatcgattaacaataaaatctccgatgaggagatttataatattattcaaagggttggacttgataaaacagataagagaaagtataaaagatactctttaggtatgaaacaacgtttagggatagcgcaagctttaatggaacaaccaaaattactgttattagacgagccaactaatgctttagatagtgatgggataaaagatgttttagatattttgaaagtagaaaaagccaagggaacgactattgttgtagccagtcatgatgtgcatgttctagataatgaaatggtagatcgtattgtacatgttaataatggaaagttggtagattaagagtgacgagaaaacatatcttaataagtattggattgtgtctgttgctatgtatatttgctagtttatttagatttaaaacattaaatctaaataatgaatcttataaagtggtaaaagatgagtttttatctaatagaacttttgaagatgagcgaggaattacgtttcatgcacttgatcctcttgatcctacaaaagtttatgatccctatgaagaccgtgaagtagtgacgtatgtgttacctttagatattacaaatacaacaaatcgagatattaacttgcttagtaataagtctatttccgatacaatgttttattctaaaataggtgagttttataatttaatcccttattcaatggaattacctaaaaaatatcagtttgatcctgtaatacctgctggtaaaacggtacgagggtatatagggacaaattattttacaggagatgacccttataaaaattataaaaacttttcaaatgaatcaactaaagtgaaattcatttcttttatgaaggataggaaagggaaatatcatgaattggaaataccgataaattaataaaatttatgattgatacagctatatgttaatggtatttgtagattttgcaacataacaatatcttttaaagtcggagtttttttgtaggtgtaagtatctatggatgctacacctgcaaagtttccggctttttgtaattgttgatttagattttattaaggaatttctggtagtcatattctttcaaaggaaacttgaaagaatatgacttagatttaatacgaaatttgtaacgtgaaattgaaatagcgagacagagaaaaggaacgtaacaaatgaaataaaaactttttttgaatataaggcccgacatcttgccgattgttgtcatagttataagacaagtgttacaattatcattaggtatatacattttagtttttttaattaggagaaaaattggcataacatacatttgatttttataacgactgattgtaatagagaaaaagaaaacaatcggaagttttattttaataaaaagaggagcgtatttcctatgatcggtattttaaaaaaggtgtttgatgtaaatcaacgccaaattaaacgtatgcaaaagacagttgagcaaattgatgcattagagtcatctattaagccactaactgatgaacaattaaaaggaaagacgcttgaatttaaagaacgtctaacaaaaggtgaaacagtagatgatctactacctgaagcttttgcagttgttcgcgaagcggcaactcgtgttcttggaatgcgtccatatggcgtacagttaatgggtggtattgccttacatgaagggaatatttctgagatgaaaacgggtgaaggtaaaacgttaacatctacattacctgtatatttaaatgcattaacaggaaaaggtgttcatgttgttacagtcaatgaatatttagcacaacgtgatgcgagcgaaatgggacaacttcatgagttccttggcttaacggtaggaattaacttaaatagtatgtcacgcgaagagaaacaagaggcttatgctgctgatattacgtatagcacaaataatgagcttggattcgattacttacgtgataacatggttttatataaagagcagtgcgttcaacgtccacttcactttgctattatcgatgaagtcgattctattttagtcgatgaagcacgtacgccgcttattatttcaggacaagctcaaaaatcaacagagctatacatgtttgcaaatgcatttgttcgtacgttagaaaatgaaaaagattattcatttgatgtgaaaacgaaaaatgtaatgctaacagaagatggtattacgaaagcggagaaagctttccatattgaaaacttattcgatttaaaacatgtagcacttcttcaccatattaatcaggggcttcgtgcacacgttgttatgcaccgtgatacagattatgttgtacaagaaggcgaaatcgtaattgtagaccaattcactggtcgtcttatgaaaggtcgtcgttatagcgaaggattacaccaagcgattgaagcaaaagaaggtgtagaaattcaaaatgaaagcatgacgcttgcaacaattacattccagaactacttccgtatgtatgaaaaattatctggtatgactggtacagcgaaaacagaggaagaggaattccgtaacatttacaatatgaacgttattgtaattccgacaaacaaaccgattattcgtgatgatcgtgccgatttaatctttaaatcaatggaaggtaagttcaatgctgttgttgaggatattgtaaatcgtcataaaaaaggacaacctgttcttgtaggtacagttgcaattgaaacttcagagcttatttcaaaaatgttaacgcgtaaaggtgtacgtcataacatcttaaatgcgaaaaaccatgctcgtgaagcagatatcattgcagaggctggtatgaaaggtgctgtaacaatcgcgacgaacatggcaggtcgtggtacagatattaagcttggagacgatgtgaaaaacgttggtttagcagttatcggtacagagcgtcacgaaagtcgtcgtattgataatcagttacgtggtcgtgctggtcgtcaaggggaccctggtgttacgcagttctacttatcgatggaagatgaattaatgcgccgatttggttcagataatatgaaagcaatgatggaccgccttggtatggatgattctcagccgattgaaagtaaaatggtttctcgtgcggtagaatctgcacaaaaacgtgttgaaggaaataactatgatgcacgtaagcagttactgcaatatgatgatgtacttcgtcaacaacgtgaagttatttacaaacagcgtcaagaggtaatggagtctgacaacttacgcggcattattgaaggtatgatgaaatctacagtagaacgtgctgttgcccttcatacacaagaggaaattgaagaagattggaacattaaaggtcttgttgactacttaaatacaaaccttcttcaagacggagatgtaaaagaagaagaattacgtcgccttgctcctgaggaaatgagcgaaccgattatcgcgaaattaatagagcgatacaatgaaaaggaaaagcttatgccagaagagcaaatgcgtgagtttgagaaggttgttgtattccgcgttgtagatacgaaatggacagagcatattgatgcgatggatcaccttcgtgaaggtattcatttacgtgcttacggtcaaatcgatccacttcgtgagtaccaaatggaagggttcgcgatgttcgagtcaatggttgcttctattgaagaggaaatttctcgttacattatgaaagctgaaattgaacaaaacttagaacgtcaagaagttgtgcaaggtgaagctgttcatccttctagtgatggcgaagaagcaaagaaaaagccagttgtaaaaggtgaccaagtgggccgcaacgatttatgtaaatgtggtagcggtaaaaaatataaaaactgctgtggtatcgttcagtaatataggacggtagctttggctgttttgcaaacttttatatcaaaaatgtataattaagaaggattaaactctctccgtaataagtggagagagtttcccttgttttcatacgaaagtaacagcaattacatagaggtgaaggaaatggaattagtagaaattagacaggaattagagaaaatggctaagcgattagcggcttttagggggtctctttgacctccctactaaggagaaacaaattgcagaattagaagaaaaaatgatgggcgcaggattttgggatgaccaacaaggcgcacaagctgtaattaatgaagcgaatgcgttaaaagatatggttggaaagttccgtcagttagatgagacgttcgaaaatttagaaatcacgcatgagcttttaaaagaagagtatgatgaagatttacatgaggaattagaatcagaagtaaaaggcttaattcaagaaatgaatgagtatgagcttcagttactattaagtgatccttatgataaaaataatgcgattttagaattacatccaggtgcaggtggaactgagtcacaagactggggttctatgttattacgtatgtacacacgctgggctgaaaaacgcggattcaaagtagaaacggttgattatttaccaggtgatgaagctggtattaagagtgtaactttattaattaaaggtcataacgcttacggttacttaaaagcagagaaaggtgtacatcgtcttgtacgtatttcaccattcgattcttcagggcgccgtcatacatcgttcgtatcttgtgaagttgtaccagagttcaatgatgaagttgaaatcgaagtacgtacagaagatttaaaaattgatacgtaccgagcaagtggagctggtgggcagcacgtaaatacgacagattcagcagttcgtattacacatacaccgacaaatacggttgtaacatgtcagtcggagcgctctcaaattaaaaaccgtgagcatgcgatgaaaatgttaaaagcgaaattatatcaaaagaaactagaagagcaacaagcagaattagatgaaattcgcggagagcaaaaagaaatcggatggggtagccaaatccgttcttatgtattccacccgtattctcttgtaaaagaccatcgtacaaatacggaggttggtaacgtacaagctgttatggatggagagattgatccatttattgatgcttacttacgttctcgcatctaataagcgaaaaaaagccaacgaaattgttggcgcatgctgaggacaatagaggatataaagaatttgattttatttttatagatgaagtaaagaggaagagaagttggaaacgacaacttctctttttgatgggattatatgtagattacaatgctgtatattgttttgtaaaaagtagagaatagtaaaatagagcggtaatagggtaaagatttatatagaacttttctaattttccttttaaaaaggatactttatagaagtttttttagttgttcacagaattgaaacaacttatgaaagctttattttatcaaggttctcactgtatttttgaggaatatgaaatacaccttagtttttctatataaagataatgcttataatgaaaatgagtgtgttaggaataaaaagaatatcaacaatagggagcgatagaagtgaaaaagaaattgttggctattgcgctagggacatcggttgtttttgctttaggagcatgcggaaataaagaagagagtaagtcttcgaaacagtctgcaagcacagacagcgcagaacaaattttccaaagaagttgtgcgggatgtcacgcaacagatttatcaggggcaactggacctgatttaagaaaagtaggcggtaagtacgacgctgcagatatcgaagagattattaaaaaaggccgcggttcaatgtcaccaggacttattcaaggtgaagatgcgaaaaaagtatctgaatggttagctgaacataaataaaaaaggtgaaatggacgagttgataatatagtcaactcgttttccttttttctggtatgtaacataactgtaacaaaaatgtatccaaattggaaaccgtttgatgttacaatggggtttgtagaattttgctgaaatatattacatagagtggtattgcttatgagaaagcataagtaaactaccttcaacaaggatgaataaatgaaaatgaaggatgtcttttattttcagatgtacagaaaagtatttcgaaaaaaatcattaagtattgggtgataaataatgataaaaatgacgaatgtttataaggagtacccgaatggtatgaaagccattgctggtcttacagttaacattaaacaaggtgaattcgtatacgtagttggaccgagtggagccgggaaatctacatttattaaaatgatgtatcgtgaagagaaaccatctacaggatctattaatgtaaatggacttactatcgaaacattggcagaaagagacgttccgtattttcgtcgtcaattaggcgtaattttccaagattttaaattgctacctaaattaacggtatatgagaatgtttcgtttgctttagaagtaattgaagaagaaccggatgcaattcgtgagcgtgtaacagaagtgctaggtcttgtaggccttgaagatcgtgcagacgcacttccaagtgagctttcgggcggggagcaacaacgtgtggctattgcaagagcaattgtaaatagaccaaaggttgtaattgccgatgagccaacaggtaacttagatattgaaacagctcttgatattatgaatatttttactcgcattaatgagcgcggcacaacgatcgttatggcgacgcataatgcagatatcgtaaatacaatccgtcatcgtgtaatcgcgattgaaggcggaaaaattgttcgagatgagattgagggaggatacggatatgaaggctaagacccttagtcgacatttgcgagaaggtgtaaagaatctatcacgtaacggatggatgacatttgcttctgttagtgcagtaacagttacattattacttgtaggtgtctttttaacagcgattatgaatatgaaccattttgcgacgaaagtagagcaagatgtagagattcgtgtacacattgatccagctgcaaaagaagcggatcaaaagaaattagaagaagatatgagtaagattgcaaaagtagattctattaaatattcttctaaagaagaagagttaaaacgtttaattaaaagcttaggtgatagtggaaaaacgtttgagttatttgaacaagataacccacttaaaaacgtattcgttgtaaaagcaaaagagccaaccgatacagcgacaatcgcgaagaaggttgaaaaaatgcagtttgttagtaatgttcagtacggaaaagggcaagttgaacgattatttgatactgtaaaaactggtcgtaacattgggattgcgttaattgctggtcttttattcacagcgatgttcttaatctctaatacaattaaaattacaatttatgctcgtagtacagaaattgaaattatgaaacttgttggtgcaacaaactggtttattcgttggccattcttgctagagggattattcttaggagtattaggatcaattattccaattggcctaattctaattacgtataattcgttgcaaggtgtgtttaatgaaaaacttggcggaacaattttcgagcttctaccatacagtccgttcgtattccaattagctggtttactagtgttaatcggtgctttaatcggtatgtggggaagtgtaatgtcaattcgtcgcttcttaaaagtataaaaagttgcaaacataattcgtacaagcttatcatatagtagaaataggtaaaggcatcacacactgtgtgatgccttttgctacaccacctgtgtgttttggaaaggggaattccgcattgaaacgtagagttgcaattattggaatggttgttgcatttttaattggtgctggcggaatgtttgcaggcatgtctgtatttggggttaacccatcagaagtaacgcaaacaatttcgagtgggaatgctagcactgcgcaagggaatttggcaaaaattaatgaggcgtatgcactaattgattcacgttatgtggaagacgtgaaagatgaaaagttagttgaaggtgcaatacaaggtatgttgtctacgctgaaggacccttattccacgtatatggataaagaaacagccaaacagtttagtgaatcgcttgatcccgaattagaggggattggggctgaggtgaacaagacggacggtaagcttattatcgtatcgccaattaaaggttcaccagcagaaaagataggaattaaaccgaatgaccaaattttatctgtagatggaaacagtgtgaaagacttatcacgtgaagaagcagtattaaaaattcgtggtaaaaagggaacgactgtcgcaattgaaattaaacgtgcgggagtaactgatccgatcgtatttaaaattaagcgtgaaaagattccaatctttacagtatttagttctgtgaagcaagagagtggaaaagatatcggttatatgcaaatcacttcttttgctgaaaatacagcgaaagaatttaaggatcagttaaaagagttagagaagaaaaatataaaaggcttagttattgacgtacgtggtaatcctggtggctatttaaatagtgtagaagatatactaggggaaattatgacgaataaaaagccgatgctacaagtagagcagcgaaatggtgagaagaagaaattctctacggaactgaaagagagaaaaccatatccaatttcagtattaattgataatggaagtgcttctgcttcagagattttagcgggtgcgctaaaagaaggagaaggatacgatttaattggtgaaaagacatttggtaaaggtactgtccagcaagctgttccatttaaagacggcagcaacattaaattaacgatgtttaaatggttaacaccggatgggaactggattcataaaaaaggaatcgcgccaacagtagaagtgaagcaaccaaattattatcatgcgacaccaattcaaattgaaaaaacactttcatacaattcaaatgatgtacaagtaaaacatgctcaagaaatgcttaagagcttagggtatgtaccaggtcgtgaagatggatactttagtaaagagacagaatcggctctgaaagcattccaaaatgcaaatgagatggaagcgacaggacagcttgataaaaagacagctgaagcgattcaaactaaaattatcgaaaaaattcgttctggagaaaatgatctacaattacagtcagcattaaaattaatggcaaaataagaagaaatacaggcagtttgctgcctgtatttttttgtgttaaacaaacgtttgtttagttatgataatataaaaagaaagaatgatataaatggtggtgaatgagttcatggaggcgtggatttttgaaataatgcgggcagttggacgttttttcttacaccctgctgtctatatatttgtaataagtagtatcttcgttggatacttacgtatgttaagagaacgaaaagatttttcttttaaagtttatgatatttggtttgaactgcgaacctctctatttgaagggattggatacggattagtagtatctattgttacgattgggcttggacttgttgtttctaaagcgagcttatgggccattttaatttggacgttactatttggattaacggctatgtatcgatatttatcggcggcttatacatttagcattgcgattgtatgtgttctattatcttctaagctaccagtttcctttttacagcttcgagaaggtgaagagagtaccattgtatcccttgttattttactaggcgttatgcttattgtagaaggcttattgatttctaaaaacgcagtaggatattcgacgccgaggattaggaaggggaagcgtggattaaagattggtttacacgaatcaaagcgtttatggatcgttcctatttttattcttgtaccgggtgatgcggtaacgcagtttatttcatggtggcctgtcgtttcaatcggttcaaatacatattctctattcctcgttccatttttaattggatttatgagaaagattaaaagttatgagccgacggaagccttattatttacaggaagacgtgtttatggattagcaggacttgtgctcgttttaggagtcgcaagttactggtggcacgtacttgcaattatcgcgatgggagtcgcaatgcttgggcgtttcacaatctcgatgcaagagaaaattgccgatgaaacaagaccagcatattttgctgcacgcaatgatgggctcgttgtactagatacaattccaaatacaattggagcagagctaaaattactgcctggagaaattattacgaaagtaaatggagtcattccaaaaagcgccgaggaattttatgatgcgcttcaaacgaagacgacaggagcattttgtaaattagaagtattagatacaaatggtgagcttcgtcttgcacaaactgcattatatgttggtgggcatcacgaattaggtattgtattcgttgagcaggagcacgagtgggattcggaagcgatgtaatagaaggagaggtatcaccttgtggtgataccttttttgtttttttgggggaagggtagttagtaaatgaaatttatatcggcgattatccgaatatatcagcgcaactcgaaatatatcggcgattattcgaatatatcgactttccagcaaaaaacgacaactatcgcaaagcttattttcagtttcatagacggataacttgaataattatttgataatggttatcatttagggagtctttttaattttggaaaatggaggtaagatatgctgcgtaaatttttctcgtactataaaccgtataaaggtttatttatactcgacttttcttgtgcggttgtcgcaggattattagaactcggcttcccgcttatcgtaaatcaatttattgataagttattgccagggcaaaactggacgcttattttatgggcttgtttcggtttactcgcagtttatatgttaaatgcaggcttacaatatgtcgttacatattggggacatatgcttggtgttaacattgaaacagatatgaggcagaaattatttgatcatattcaaaagctatcattcagattttttgataataataaaactggtcatttaatttcacgccttacaaacgatttaatggaaattggggaaattgctcaccatggaccagaagatctatttatcgccgtaatgactttagttggggcattctcatttatgatgatgatcaactggaagttagcgttattaacgttcttcgtcattccattcctattatggttagcactttactttaataaaaaaatgacaggtacatttagacgtttattctcagacgttgctgattttaatgcatgcattgagaacaatgttgggggaattcgtgttgtacaagcattcggaaatgaaaagtttgagaaagagcaatttgctgtcaacaacgctcgtttccgtacaacgaaattaatggcgtataaaattatggcgttaaattcatcgattagttatatgctcatgcggctcgtaacgctcttcgtcttaatatgcggtacatggtttgttctgcaaggagaattaacgtacggtggatttatcggattcgttctattaacgaatattttcttccgcccaattgaaaaaattaacgcggtaatcgaaagctatccgaagggaatcgccggttttaaaagatatgtagagcttcttgaaacagagcctgacattgtagactctaaagatgcaatggaagttaaacatgtacatggtgatattcaatataacaacattacgttcggatatgaaaataaagaaccaattttaaatgacattagtttgaaaatacatgcaggtgaaacggttgcgttcgttggaccatcaggagctgggaaaacgacgttatgtagcctattaccacgtttttatgagcaatcatctggatcaattcaaattgatgggattgatacgaaagatatgacattatcttcacttcgtaagcaaattggaattgtgcagcaagacgtgttcttattttcaggaacaattcgtgaaaatatcgcttacggaaatttaaaggcatcagagcctgaaatttggcaggcagtaaaacgtgcgcagttagaagatttaatttactcacagccggaaggtttagatactgttatcggtgagcgcggcgtgaaactttcaggtggacaaaagcagcgtctagctattgctcgtatgttcttgaaaaacccgccaattttaatattggatgaagcaacttctgcactagatacagagacagaacttgcgattcaaaaatcgcttgctgaattagctgtcggtcgcacaacgctagttatcgctcacagacttgcaacgattaaaaatgcagatcgcatcgtcgttgtaaataaagatggcattgcagaacaaggttcacataatgaattaattgagcaaggcggaggatacagtaggttatacgaagctcagtttagttcgtaaatataatttgtactgaattagtgcaccataagtaggtaaaaatctcatatgggaggctataaagtatgattgtaacaacaacgtctacaattcaaggaaaagaaattattgagtatatcgatatcgtcaatggagaagcgattatgggtgcgaatatcgttcgtgaccttttcgcttctgttcgtgacgttgtcggtggtcgtgctggcgcttatgaaagtaaattaaaagaagcacgcgacatcgcaatggaagagatgaaaactttcgcaagacaaaaaaatgcaaatgcaattgttggtatcgacgtggattacgaagtagttcgcgaaggtatgttaatggttgcggtgagcgggactgctgtccgcatataaagtaaaaagccgtgctgatgcacggctttttactttgtatgtcgaagtttcaatatttcttgggaaatgtggaaggccccgtcgatatatagggaagacattagagcgcttctttacatttttgaatttgagttaataattttgcgtattcttgttcgagagatgtgatgtcatcgtgatgatttggaatggaaatccggccgatgacttctgttaattttgtttgtaatcgtaacaattcttgctcagtagcgtttacagaagctccggtggttctttttgtgtattgctcgtaattaccgtggaagattcttggttcactctcatctacttgtagaatatggtctgcaacagagcgaataaaggcacggtcatggctaatgaaaagtattgtgccaggatattcttgtaacatggtttctaattcttcttgcgttgctaagtctaaatagtttgtcggttcatctagcagaagcatattatagtttcctaaaaatacttttgcgagtgcaaccttcattcgttcacccccgcttagaacatgcacaggtttatgaacatcctcacggcggaatagaagtcgtgcaagtattgtgcgaacgaatgcttctgtatagtttgtttcttctagaacattttctaaaatggttttatctgtttttaaaatagataatgtttgttcgaagtatccaattttacaacttttcgatagctgcatgccacgctcgtttgtgagaagcatgttgaacaaagtggttttgccgcttccatttgcccctaaaacggcaagctttgcaccaggggcaatagttccattcatatttttaaatagtgtgcggtcgcctattttctttgttgctttattgaattgtactgccaccttactatgaatgggagtatggtattgcacgtcaaattgagcttgagaaagatcctttggcttttccttcttttctagtttttcgagacgtgtctctaatgccttcgctgctttgctaacctgttcttggccatgagccccacttaacctataaagtctagattcagatgaactgaaccgcgttgggatttttgtcatgttagaagcacgttgctttctttgtagaatggactgttctaaacgatttttttcttgtacatattgctcatattctgcttgtttttgtattcgttcacgttctttttgttttcgatagtttgaataattccctttgtactcttgaatagtaccgtcttcaatttcaataattttggtacatatattatctagaaattcacgatcatgcgatattaaaacaagtgctcctttataagacgaaagtgccttttctaattgctctgtaccgaccatatctaagtggcttgttggttcatcagcgaataaaatgcctgcattttgttcgagagcatgggcgatctttagccgcattcgttcaccgccgctcattgcgtcggtaacgtttgaaatactccattttccttttgcaagagaagaagcagtttccggtagttcttcgctaagctgaggaatgatgctgatagaactatgatgagttactatgcctctgtcagcttctatttctttacttaatatttgtaataacgtagatttaccagctccgttgactccgacaattcctatgcgatcctgtgcttgaatttccagtgatggtaatgtaaatagtgtgcgatcaccaaagctcttttcaatattacttgcgaataaaatagtcataaaaaaacctccctagtttcactagagaggataaacgtcgcccttgtatgtaaaaaaatcgtacataaataaacgattttttacatgatcgtttcgaaagaaagtatcgacaaatggacagactaatcccctgctagttttcatcatttttgttcactatttgtgatggatgaaataaataagagaattagaacttcattggtcaaagtaccttcctttcataatattacttttattgtatgcgcatacaaaagggtttgtcaaacttatttctgttcgctatttttgaatgtatcattatacaattgtgcttttgccagcgcctcagcatcgtttttaatttcatccagtccattcgcattcccgataacataaccttcaaatgaagagccaacaaaatcaaagatatattggaattgagcaataagcggtaatgcttttacctttgggttgtccccgccaacgatgacaacatacatttttttgcctttcattttttctttgaaatgaagggatgtatcgcgcaagctttgtgaccagcgatcaacaaaatttttcatatgtccactcattccgtaccaatataatggtgtagcaaagataatcgtgtcgtgttctagcatgcgtttcgttaactgctcatagtcatcatttacggattggaatccttctgcatcatgacgttggtctgtaataggatagacagtatgatcacgcaaataaatttgttctgtttcaatgtcctctatcatcatatgtgttaaagcttctgtatttccgttttgtcttgaactgccatgtataacaaacatgtaatcatcccttttcttttgcatgttttaggagtgaaacgtgtttttgcaaattcgtttggatgttggaaagcaatgagatttgctttgttacttcattgagtttatcttcgtaaagcgtaaggatactgctgcacggattgtcgtacaggtgcggttcaatttcaaggcagcgcagcatccttgccgtctcttctaaatttaagccaatttgtaagtacatttgaataagctccactttttcgatggcactttcatcaaaatcacggtaaccattcgcaaggcgcttagaagggagtaagcccttttcttcgtaatgtcttagtgatctttcactaacgccagtttcttttgataattctccaattcgcaatgtatttcactccttttacatgtattgtaaaccttcacactaatgtgaaggtcaactctgttttttcgcaaaagaatctacatgatttaagaacacttgaatggctttagatggaatgaaatatttaccgcgcacgatggagaacggacggattagttgttcatttggaacttcgacgtggaatagttcttttgctaatagctctttccgtacagtccaatcagaaaggatagcgatgccaagcccggcactaacagcttcctttacgctttggatactactgaatgtaaagaatcgtttcatttttaaatggtgttgatgaataaagcggtcactataagcgcgtgtaccagaaccactttctcttaatacccatacttgatcttggagtgtactttcatttatttcatttgtgcggagtaatggatgatttggcgggacgacgagcttcatttcatcttgcataaatgtttcaacatctacgtcggcgtatacgacttgtccttccactaggccgatatcaatttgattagagcgaaggctttgcaaaacgtcttctgtatttgagatgaaagtatgaacttcgacgtgtggattttcattcgcatagttagccagtatttttggaagtaagtattcgccaattgtaaaactagcaccaatgcgaagtgttcctgttacaacgttatgtagttcattaatttcttgtttagcatcttcgtaaagagagagcatttgctttgcatgtatatataatatgtttccagcttcagtaacttggacgtgcttcggggagcgttgaataagtgtagtgccaaattcgttttctaagttgcgtatatgcatacttactccaggctgtgaaaggtttaataattctgctgcacgggagaagtgtttctgttcaacgacagtaacaaaaatttttaaaatgtctacgttcatataatgggctcctttctttttctattatcttatcataagtatttctaatgatagagatttggtattggtattaaacttattatagaaactctcttataatgtaagtagaaagaacatgcatgttccaatacgattattggagtggttcaaaatggaacaaacacttgttatacaaaagaagaagcgttttggattttcgcaaggaattgggattacattattaatcgcaattgccgcgaaatatttagcagagcttccatttttaaatattatgggacaattagtaattgctattctaattgggatggtttggcgcgctgcaattggagtccctcaagatgcgattgcagggacgaactttgcgagtaagaatttgctgcgctttggaatcatcttacttggaatgcgattaaatcttgttgatattgcgaaggcagggccgaaagtattggtcatcgcagcggttgttattacatttacgattttcgttgtatatggactaacgaaagtatttaaggtagaaaagaaacttgggattttaaccgcatgtggtacagcaatttgcggggcggcagcggtcgtggcaattgcgccgcaagtgaaagcaaaagatgatgaaacggcagttggggctgcaattattgctattttaggtacgatatttacgcttatttatacgttgttatatccagtgcttggcctatctccatatggttacggtgtattctcaggggccacgctgcatgaaattgctcatgttatcgcagccgcggcgccaggaggaagtacggctatagacatcgcagttatcgtgaagctaacgcgcgttgcaatgctcgtaccagtagcaattttaattggattatggtttggaaagagtgaaggaagcaaggaaaaaagatcgtggcgcgaccttccaattccatggttcattttcggatttttagcgatgagtgcagtgcattcgctcgggattattccagaagtagttgcgggatacattgttgtcattgcttatatgctaatcgcaatggcgatggcaggacttggtttaaatgtagagtttaaaacgttccgtaagttaggaagcaaagcgttcgtggcggggctgattggctcggtttgcttatcggttcttggatacgttcttgtatatgcgctaggatttatgtagtagaggagaaagctgttcccgaaggtatttggggacagctttttcttatgattatagtagcgctacggatgtcgatatttgtcggtaagtcgatatatttaaaaaatcgccgatataaatggagttgcgctgatatatttgggaaatcgccgatataatttaagttgcgctgatataaattgaattactcttgtactttattagagtaggtgttcagtgaaacgtttttctaaaatttgtaaaggtatctttacttataactggaaaatatttataatttaagtaaagatatctttacttttgaaggtggagcctatgggtgtgaaaaataaaataaaagagttaagaaagcaaaatcatataacgcaagttgaaatggcaaaggcgatgcaagtgacgcggcagacgatagtggcgattgaaaaccatcattacaatccgagtctagagttatctttaaaaatcgccaagtattttggagtgaaggtggaggaaatatttacgctggagtaaggagaaagaaaataaatgataagcttgagagatttcaattagagtaaacgtttaaatatataaggattggttttgatttattaattagtatcgcatcaacgagcgtgttagcaacaaggaataatagatagaaaaaggggaactgggatgggattaccggtgttatgtgtcgctacagctatattttcgcttctttggggaatgcaaaacttttctcgtaatccagtgccgagcatttgtattatgattggtactgtaggtttatcgtattatttattattattagcccattatcataaaacggcaacgagtgttgtcgttggagcacttattttattttgtgggcgcgccatacaaaaggggttatttccataaaagctgtttatacactttgtataaacagctttttgtattttttttacaaaacgcttgaaagttacgtaacgtcatcttttataatgagagggaagaggtgatggtagtgatttcaatacaagaattgacgaaagaaacaggggttacagtacgtacactacgttattatgatcaaatagatttattaaagccgagcggaaaaacagagggtggacatcggttatatagtgaaaatgacgttattcgtttgcaacaaattttatttttgaaagaaatgggattttcattaaaagaagctgcgaatatgttagtaaaaggtgagctggatttaaaaaattcgcttgaaaaacaacttcggtttgtacaggaagaacaaaagaaatttaatcgaatggagcgtgttttacaagcagttgtttattcggtagatgtagagggagaacttgattggaaagttatgtttgaacttattcagctttcaaaacagtcccctcgtatacgtgaaatatttcaaaatgaagtattttcaaaggaagaacaaaaattgcttcagaatttgccaaatatgagtgaggaagatccgaatgttttagaatgggtagatttattaaagcaattacgtacttttatgaaagacggtaaagaagtcgcaagtgatgaagtacaagaggcaacgaagaaattaatgcagaaatgtttagaaatggctaatggtgacgaagcgtttttagataagttatgggaagttagaaaatcgaaggaagattcacagaaaatgagcatgtatccaattgaagaagaacttttagcatatatggatgaggcttttcgtatttatgatgaaagggagaaggataaatgagtatactcgcagaatatcgttggtattttttaattggggcagaaattgtattttggttatcagctatcggtttctttttacttcgctacggattccgtttgaaaagggcgagttttattatggggattgtactcctcgtaaatgaagtatttattttaactttaggggtagtggactattatcaaacaggaaagttctctaactttcagattattactgtaatcattttattatatgcagttttctacgggaaaaaggatttaaagaagcttgatatatttgtacaaaaatcagttgcgaaatggcgtaatgaaccggcgcctattattgaagaacaggtagaattaacaggtatggcctatgcaaagcaggaaataaaaaattgggtattacatcttgttttattcgttggtgtgcacatattttttttcttcgcgtatggatttattccatttgaacaatggggtaattggttagaatcgggaatcgttttaaataaagctgcaagtcgcgtgagtcaagtgtgggcgattatatttttagttgatacagcgatttcattttcatatgtgatttttccgaagaaggagaaaggaaaagaaaagctactttcataattgaaagtagcttttctggtatacaaataatttttataggagaggatgacaataggaaaaagaaccagttttataagtctatttctctttagtttagtagcatgttcaccatctagcactacaattgataagaagaatgatgtcattgtaaagggagcaggaattctcaatctagataaatttgaaaagttcgttttgaatgtcgagcaaagggaagttgataaaataagaattgtacagtatacccttgaaggggacccgatttttcaaacgttagagtatagtgggaacgatatattttatgtgtcagataatagaaaagacaaatttgctgggaaggataaagggttacataaagatagttgtaaaggtattgttaaagagcagcgcgaatcaggaagtacttatcggttaatagattgtatgaatgaagctgggcgcaatggatatgacttagtatatgtacctaaaaaatagaattagtagaggaaggaagtatttactccttcctttttctatgtgtatattgtcgaaaactttaccgaatatctgttcgtttttttaggttttttataggtattcgtggtaaaataataatacagatttttatgaggaggtcggattttcttggaacgtcaatttgaaattgtctcagcgtattccccgcaaggtgatcagccggtagctatagagaagcttgtagagggaattaatagtggaaagaaaaagcaagtgttgcttggagcgacaggaacgggtaagacatttacgatttcaaatgtcattaaagaagtgcaaaagccaacacttgttatggctcataataaaacgttagcagggcagttatatagtgagttgaaagactttttcccgaataatgcagttgaatattttgttagttactacgattattatcagccagaagcgtatgtaccacaaacagatacgtttattgaaaaagatgcgcagattaatgatgaaattgataaattgcgtcactcggcaacgtctgcattatttgaacgggacgatgtaattatcgttgcgagtgtttcgtgtatatatggcttaggttctccagaagaataccgcgagctagttgtttcgcttcgagttggtatggaaaaagaccgtaatcaattgcttcgtgaacttgttgatgtacagtatggacgtaatgatattgatttcaagcgtggtacattccgtgtacgcggagatgtagttgaaatcttcccagcatcacttgatgagcattgtattcgaattgagtttttcggtgatgaaatcgatcgtattcgtgaagtaaatgcgttaacaggtgaagtattagcagaacgtgatcatgtagcaatcttcccagcatctcacttcgttacacgtgaagagaaaatgaaggtcgctattgaaaatatcgaaaaagaattagaagaacgtttaaaggagttaaatgataacggtaagttgttagaagcgcagcgtatagagcaacgtacacgttatgatttagaaatgatgcgcgagatgggcttttgttcaggtattgaaaactactcccgtcatttaacacttcgtccagcgggggcaacgccgtatacgttattagactattttccgaaagatttcttaatcgttatggatgagtcgcacgtatcagtaccacaagtaagagcgatgtataacggtgaccaagcacgtaaacaagtgcttgtggatcatggattccgtctgccatcagctttagataatagaccgctcatgtttgatgagtttgaggagaaaacgaatcaagttatttacgtttcagcaacgccaggaccgtacgagttagagcagtcaccagaagtaatagaacaaattattcgtccaacagggcttttagatccaccaattgatatacgaccaattgaagggcaaattgacgatttattaggagagattcaagatcgtattgcaaaaaatgaacgtgtattaattacgactttaacgaagaaaatgtcagaggatttaacggattacttaaaagatgtaggaattaaagttaactatcttcactctgaaattaaaacgttagaacgtattgaaattatccgtgatcttcgcctcggtaaatttgatgtacttgtcggcattaacttattgcgagaaggattagatattccggaagtatcacttgtcgctattttagatgctgataaggaaggatttttgcgttcagaacgttcattaattcaaacaattggtcgtgccgcgcgtaatgaaaacggccgcgttattatgtatgcagatcgtataacgaaatctatgggaattgcgattgaagaaacgaagcgtcgtcgtagtatacaagaagcttacaatgaagagcatggtattacgccgaaaacgattcaaaaaggcgttcgtgatgttatccgtgcaacgacagctgctgaagaggcagaaacatacgaagcaactccttctaagaaaatgacgaaaaaagagcgcgaaaagacaattgcgaagatggaagcagagatgaaagaagcagcaaaagcgttagacttcgagcgtgcagctgaactaagagatttactattagaattaaaagcggaagggtgaaaaaagtgagtaagagcaaggattttatcgttgtaaaaggtgctagagcacataacttaaaaaatattgatgtaaccattccgagaaatcagcttgtcgttgtaacgggattgtctggttcggggaaatcatcattagcatttgatacgatttatgcagaagggcagcgcagatacgtagaatcattatctgcgtatgcgcgccagtttttaggacaaatggataagccggatgttgacacgattgaaggattgtcaccagcgatttcaatcgatcaaaaaacgacgagtcgtaatccacgttcaactgtcggaacggtaacggagatttatgattatttacgtttattatttgcgcgaattggtacgccaatttgtccaaatcatgggattgaaattacatcacaaacagtagagcagatggtagaccgtgttcttgaatatcctgaacgtacgaaattacaagtgttagctcctatcgtgtctgggcgtaaaggtgcacatgtgaaagtacttgaagatattaagaagcaaggatatgttcgtgtacgtgttgatggtgaaatgcttgatgtatctgaagatattacgttagataaaaataagaagcattccattgaagttgtaattgaccgtattgttgtaaaagaaggaatcgcaagccgtcttgctgattcacttgaaagtgcattaaagcttggcggaggccgagtgttaattgatgtaatgggagaagaggaacttctatttagtgaacatcatgcttgtccgcattgtggtttttcaatcggagaattagagccgcgtatgttctcattcaacagtccgttcggagcatgtccttcttgtgatggacttggttcaaagctagaggtagatttagagcttgttatcccgaactgggatttatcattaaatgaacatgcaattgcaccttgggaaccgacaagttcacaatattacccgcaacttttacaatctgtatgtaatcactacggcgttgatatggatgtgcctgtgaaaaatataccgaaagatttatttgataaagtgttgtacggaagcggggaagagaaggtttatttccgctatgtaaatgaatttggtcaagtaaaggaaaatgagattttatttgaaggtgttattccaaacattgaacgtcgttatcgtgaaacgagctccgattacattcgtgagcaaatggaaaagtatatggcagaacaagcttgtccgaagtgtaaaggtggacgcttaaagcctgagagcttagctgtatttgttggcaataaaacgattgctgacgtaacgaagtattcagttcaagaagtacaagaattcttctcgaatgtagagctaacggagaagcaacaaaaaatagctcatttaattttaagagaaattcaggagcgcgttgggttcttagtgaacgttggtttagattatttaacgttaagtcgtgccgcaggaactttatcaggtggtgaggcgcagcgtattcgtttagcgacgcaaattggttctcgtctaactggcgtactttatattcttgatgaaccttcaattggtttacaccagcgtgataacgatcgtcttattcgtacattgcaagaaatgcgcgatttaggtaatacgttaattgttgttgaacatgatgaagatacgatgatggctgctgactatttacttgatatagggcctggtgcaggtattcacggtggacaggtcgtttcagcagggacgccggctgaagtgatgcaagatgataattcattaacagggaagtatttaagcggtaaagagtttattccagttccacttgaaagacgtaaaggtgatggacgtaaagtagagattgtcggcgcaaaagagaataacttaaagaatgcgaaaatgtcattcccgcttggtacgtttgtagcggtaacaggggtatctggttctggtaaaagtacgatgattaatgaagtactatataaatcgctagctcaaaagttatataaagcgaaagcgaagccaggtactcataaagagattaaaggtcttgaacatttagataaagtaattgatattgatcaatcaccaatcggtcgtacaccacgttctaatccagcgacgtatacaggtgtattcgatgatattcgtgatgtgtttgcacaaacgaatgaagcgaaagtgcgcggatatcaaaaaggacgtttcagctttaacgtaaaaggtggccgttgtgaagcgtgccgtggtgatggaattattaaaatcgaaatgcatttcctaccagatgtgtatgttccgtgtgaagtttgtcatggtaaacgttacaaccgtgaaacgttagaagtgaaatataaagataagaatatttctgaagtgttagggatgacaattgaagatggagtagagttcttcgctaatatcccaaaaattaagcgtaaacttcaaacgcttgtagacgttgggcttggttatatgaaattaggtcaaccagcaacaacattatctggtggggaagcacagcgtgtgaaattagcttctgaattacaccgtcgttctacaggacgtacgttatacattttagatgaaccaacgactggtttgcatgcgcatgatattgcacgtcttctagaagtgttgcaacgtcttgttgagagcggtgagacggtacttgtaattgaacataatttagatgtaattaaaacggctgattatatcgttgaccttggaccagagggtggagataaaggtggacaaatcgttgcttccggaacgccagagcaagtagtgaaagaagagcgctcgtacacaggtaaatatttaaaagagattttaaatcgtgataaagcaagaatgaaagagaaaataaaagaagtagaattatcgcaataagtttattgatgaaaaccgggtggaaatgacgctcggtttttattgtatagggggagaagatgaagtttttagaggtgttaaggaagaaaaatatgaaggtaagagagtttcaaaattggggtgtatattttcgaaagcgctgggaggatcactttgcaaatcatttaagtgatgaagaaaaagaagacatttttctttatggagataagtatggatgtgggtatctttggcacatatttagttatgagaaaaagaagcgtttagagggtaaagaagcaaagaacgcgtttcataatgaagtgaaaaaggattgctacattttctaccaacactgtgatgaggtactgttaataaaggatgcgagtttgttacatatggatgatatattgtgtgagagggacgatatgtataagggtgatatctatattgtagataaggagttcacttggacttttgtaaaaactcatgaacatagatggtgcggcccttattttactaagaaatgttagtaggtatacaagcatgaaagatagaataagttgatataagtgttcgtatcatacttgcgtttcttatctattagcgtatgatgaaatatatatgtttaaaaggatgtgtaacgaaatgagatggattgtatcacttcttgtaaatagcgttgtgttaatcgctgtatcgggacttttaaaagggattgcaccagatgcattttacgtagcaaatatacaaactgcaattattgcgagtattatattggcggttttaaatgtgttcgtaaagccatttttaattttaattacgctaccaattactgttgtaactttcggcttcttcttaattgttattaatgcgattacgttaaaaatagcagattcattattaggagatgcttttaatatatcaggatttggtgtagcgattgttgcggcaatttgtatttcaatttttaatatgataattgaaaaggcaattgttgagcctctatatgaaaaaaagagaaagtgacaaaaagaaaaacatttcattattcgtatgaaatgtttttttctatttattagaaaccgtatttcttgttttcagaaaaaaatggtacaatatccgatagaatggaattttacatcaaacgagactgaacccgcagcggagtggaggtttatacatatgccgaaagtaagaacaaaagatttaattgaacaatttcaattggagttaatcagtggtgaagaaggcattcatcgtccgattgatacaagtgatttatcacgacctggaattgaaatggcaggattttttacatactatccagcagatcgtgtgcagcttcttggtaaaacggagcttactttctttgacacgttaacgtcagagcaaaaacaagagagaatgaaagcgctttgtactgaggagacgccatgtattattgtaactcgtaatcaagatgtaccagatgagttattacaagcatcacgtgaatcaggtatgcctttattacgttcttctcaaacgacaacgagattatcaagtcgtttaacaaactatttagaaggtaagttagcaccaacaacagctgtgcatggtgtgttagtagatatttacggcgttggtgttttaattacaggtcaaagtggtgttggtaaaagtgagacagctcttgagcttgtaaagcgtggtcaccgtcttgttgcggatgatagtgtggaaattcgtcaagaagatgaagacatgttagtcggaagttcaccagatttaatcgagcatttattagaaattcgtggtctaggtattattaacgttatgacgttattcggtgcaggggcagtacgaaattataagcgtattacacttgttattaatcttgaaatttgggatcaaaagaaaaattacgatcgcttaggtcttgatgaagagaagatgaaaattattgatacagaacttacgaagattacacttccagttcgtcctggtcgaaacttggctgttattattgaagtagcagcgatgaacttccgtttgaaacgtatgggagtcaatgcagcacagcagttctctgaacgattaatgagtgcaattgagttaggaaatcaggagtaaactttggagagggaggtcatatacatatgctgttagcttctgtaccacagcttgaccgtgtagctatccaacttgggccgtttcctgtgtattggtacgggattattatcggtacaggtgtactattaggtctttggctggcaactcgcgagggagaaaggctaggtattccaaaagatacatttgttgaccttgtattaattgcagtaccgatcgctattctttttgcgagaatgtactatgttatttttgaatgggaatattacgcacaaaatccgagtcaaattattaatattcgtcaaggtggtttggcgattcacggtggtttaatcggggctgttattacaggtgttctttttgcgaaacgacgcggggtttccttctggaagctggctgatattgctgcaccaagtattttactaggacaagcaattggccgatggggaaactttatgaaccaagaggcgcatggtgatgaagtaacgagacagtttttagaaggtcttcatttaccggatttcattattaatcaaatgtatattgagggtgtgtactatcatccgacgtttttatatgaatcattatggaattttgcaggcgtaattttactacttgcattaagaaaagtgaatttacgtcgcggggagttattcttcacatatttaatttggtattcagtaggacgcttcttcgtagaaggcttacgtacagatagtttaatgctaggaccacttcgtattgcacaagtaatgtcaattggacttgttgttatttctattattttcattattgtgagacgaaaaatggggcaagctgataaaagatatttagaaaattagagacaagtagcatcttattataagatgctgcttctttcatattcaggaaggcgaaaggactaaggcgatgagaataaataccgtgttatttgatttagatggaactttaattaatacaaatgaacttattatttcttcgtttttacatactttaaatacatattatccaaatcaatataagcgtgaagatgtgttgccatttatcggtccatctttgcatgatactttcagcaagattgatgaaagtaaggttgaagagatgattactagctatcggaaatttaaccatgatcatcatgatgaattagtagaagaatatgaaactgtatatgaaacagttcgagagttgaagaagcaaggttataaagttggtattgttacaacgaaagcgagacaaaccgttgagatgggattacagttgtcaaagcttgatgaattttttgatgttgtcgtgacaattgatgatgtagagcatgtgaaaccacatccggagccacttcaaaaagcgcttgaattattagatgcaaaaccagaagaggcattgatggttggggataatcatcatgatattgtcggtggtcaaaatgcggggacgaaaacagctgcggtttcatggacgttgaaaggtagagcgtatttagaggcttacaagccggactttatgctagataaaatgagtgatttgctaccgattttgtctaacatgaaccgttcataaaggttcaagtaagttagtagaggagcgagctaagtgcgacggacaacgcgctatcctgtttcaggagaaaattcgttatggaatgtgtataaaacagtgtctttttggaaggtaatgaaaaactttattattatccaaattgcgcgttacacgccatttttatccgtaaaaaattggttgtaccgcacttttttacggatgaaagtaggaaagaaaacatcatttgcgcttatggtaatgccggatattatgttcccagaaaagataactgtgggagagaattcgattattggctataacacaacgcttttagcacatgaatatttaattcgtgaatatcgacttggcgaaatcgtcattggaaatgaagtaatgattggagcgaatgtaacaatattaccaggtgtgaacattggagacggtgcgactgtctcagctggcacacttgttcatagagatgtaccgagcggtgctttcgtaggtggaaatccaatgcgtattatttatacgaaagagcaaatgaccgcaagagaaggttcatggtgaaaatgtaacatttctcctctttttttatgaataaaaaggaaataattgagtataatatactgttttgttttttacggaatcgtttatacttatagatagaagaatgtgtgaacgaagaaaacaaaaaactggaggatatatggggaaaaatcaaaggatatataaggagaacggacaagttatctcttttaatcaattagcggacttcttttataaaaaagggatgagagcttacaaaggacaaaaattgcaagatgcaattaaatattttcgaagagcggcacaaagtgagaaggagccgtttattttatgtcaattagcatcagtattatctgaggctggtgaatatcaagaatcgaatcaaatcttcttaaagttagttagatctaatccagaacttgaacagtgctattattttattgcaaataattatgcatatatggggttatttcaacaggcgaagaaatatgcagatcgttatttagaagttgcaaaagagaaggaattcgtagaagatacgttagaacttcttgagattatggaagaagaagcaatgggtgcggaagagattgaagatgaagatgatttaattgttatgcaggaagaagcgaatcgctatattcgtaatggacaattggaagaagcaattgctacattagaaattgttacgaaagattatccggaattttggtcaggtcataataatttagccattgcacattttcaatctggtaatgtagacaaagcactgaagttaacagaaatgattttagagaaaaatcctggcaatatacatgcgctttgtaatacgcttatttttctatattcaattggagagcataaacaagtagaggcattagcgggacagctagtttcggtatatccgatttcatttgaacatcgtttgaaactgggaactacactcgcaacaattggttatttcgagcatgcatataagtggttcaaactattaaagcgtcaaggatatgagggagacgttagtttttattattggtttgcatattctgcgtatatggtgaaagaccagcaactagctgaaaaaatgtggcaatatgtcgtggaattacatcctgataaaaagggaaaagaaccgtggaatgcgctgaatttagcagatgaagggcaaaatgtgttatttgaagaattacgaaaatcatttcagcaaagtgcgacgctagaagaacaaatgctagctttatatttaatgaatgaattgtcaacgccggagaaggttggattcttctttgatataacgcaagcgaagaacggtgttcccatcgtatcgcaacttgcaaagtacttctttttacttaatagtcataagagtattccagctgatttacagcaatttgagcagtgcgcgagaattgcggatgcattatacaattatacgaaaaaagatgatgaattaatcgaagagtgtttacacttttggttttgtacgttcatacgtttatatacatctggagacatatttacaaatgtgtacggctggtcagctgcgattgaatacattgtacgcggcgaacaaggaaataaaatgacacagtcggagcttggagatgtatataatgtatctgtagcgactgtccgaaagtatgtgcaagctgttaagcgtacgcacacataagataagcaaatcattgggaaaaaaatgatgctaacagtataatgagggtaacttaattgtgtaagaatggataggagtgaatagtgtgtcagaagaaaaaatttatgatgtcgttattattggtgcaggaccagctggtatgacagctgcagtatatacatctcgtgcaaatttaagcacattaatgcttgagcgaggtattccaggtggccaaatggcaaacacggaagatgtagaaaactacccaggttatgagtctattttaggaccagatttatcaaataaaatgtttgagcatgcgaagaaatttggtgctgaatatgcatacggtgatgtgaaaaaagtcatcgatggtaaagaatacaaaacaattattgctggtaaaaaagaatataaagcacgtgcaattatcgttgcaagcggtgcagagtataaaaaaattggtgtaccgggtgaaacagaacttggcggccgcggtgtatcatattgtgcagtatgtgacggagcattctttaaaggaaaagagcttatcgtaattggtggcggagattctgctgttgaagagggtgtgttcttaacacgcttcgcatcaaaagtaacgatcgttcaccgtcgtgacacgcttcgtgcacagaaaattttacaagaccgtgctttccaaaacgaaaaagtagatttcatttggaatcacactataaaagaaatcaacgaagcaagtggtaaagtaggaagtgtaacacttgtggacgtaaatagtggagaagagaaagaagtcaaaactgacggcgtatttgtatacatcggtatgttacctttatcaaaaccatttgttgaactaggtattacaaatgaaaatggttaccttgaaacgaacgagcgtatggaaacgaaaatccctggtattttcgcagctggtgatgttcgtgaaaaaatgcttcgtcaaattgtaactgcaacaggtgacggtagtattgcagcgcaaagtgcacaacattacgtagaagaattattagaggaattaaaaactgtatcagaaaaataagggataatataccttgtgagaagaaagctaccgacaggagctttcttctttttttgtgtgaaaatgtcaaagttttgtcaaaaaatataaggattataagctttcttattgatatactggactttacggaaaaaatcactataagaaatgaggaatttattcagtatggaatggcgtaatatatatcgtggattttgtatgggcgttagtgatttaattcctggtgtgagcggcggtacaatcgctgttgtgttagggatttatgaacaattgcttgcggcaattagtggattctttagtcgtgaatggaaaaaacatttaggatttttaattccccttgcagctggtgtggcagcggcatttttaacgttaagtcacgttattaaatatttacttgcaaatcattatgaaccgactcaatttttcttcctcggtttaattattagtatattaccgatgttaatgagggaagctgatgcaaagtcgtcgtttaaaggtaagcacatcgttttattaatagttgcagcaattcttgttgcgattacagctttctttaaaccagataaggcagcagatccaattacgactttaacaattgtaaatgcaattggtttatttttcgcaggatggatggctagtatggcaatgctgcttcctgggattagtggatcgtttattttattaattattggtgtgtatccaacagcaattaacgctttaactacacttaacttacctttaatcgtggttatcggtgctggtgttatggttggatttgttgtaagtagtaaaggcattagttttttattagatcgttataaaagtatgacatttgcggcaattattggacttgtaatcggttcgattgtaattgtattccctgggattccgactggtggattttcaattataagttcaatcattacctttattttaggatttgcgattgttacttatttcggtaagaaataagtactttaatccccttggcgataaaaagcgttaaggggatttttcatgctattcattaaaagtctaagcatttacattgcttgttatagaaagcttttttaaaattgctgagtagcatatgcttagcgaaagaggactggctccttcgttgtagcaaactgtttttgatagtataatgaaagaagtatgcagtgaggaattttactgcaagtagctgaggtgaagaaacatgcaaagagtgacaaactgtgtgttaattagagataatgaagtactcttactccaaaaacctcgccggaattggtgggttgcaccaggcgggaaaatggagcgtggtgagactgtaagagattccgttgttcgcgaatatcgcgaagaaacaggtatttatttgaaaaacccagcgttaaagggggtcttcacctttgtcatccaagaaggtgataaagttgtttctgaatggatgatgttctcctttttagcgacagattttgcaggagaaaacaaactagagagcgaagaaggcatcattggttggcatacatttgataaaattgatgatttagcaatggcgccaggagattatcacattattgattatttaattaaaggaaatggcataatctacggtacatttgtatataccccagattttgagttgctttcatatcgattagatccgagttaaaccgtcaaggagaggatacgatgacagagaataatgatataaaaatggtaattattacagggatgtctggagctggaaaaacagtagctttacaaagttttgaagatttaggatatttttgtgtagataatttaccaccgatgttattgccaaagtttattgagcttatggcggattcaaaagggaaaatgaataaagtggcacttggtattgatttacgtggccgagagtttttcgaacatttatggggagcacttgatgatttatcagaacgtacatggattattcctcatattttatttttagatgcgaaagatagtacgcttgtaactcgttataaagaaacgagacgttcgcatccacttgcaccaactggtttgccgttaaagggaatcgaagcagagcgcaatttattaacagatatgaaggcacgagcgaatattgtgcttgatacatcggatttaaaaccgaaagaattacgtgaaaaaattgttcacttgttctcaacagaaactgagcaagcatttcgtgtaaatgttatgtcatttggatttaagtacggtattccaattgatgcagatttagtatttgatgttcgttttttaccaaatccatattacattccacacatgaagccattaacaggactagatgaagaagtttcttcgtatgtactgaaatttaatgagacacataagtttttagagaagttgacggatctgattactttcatgctgcctcattataaaagagaaggcaaaagtcaacttgtaattgcaattggatgtacaggtggacagcatcgttctgttacgcttacagaataccttgggaaacatttgaaaccagagtatagtgttcatgtatctcatcgtgatgtggagaagagaaagggccattaagggatgaaaaaagagagaaaacctaaaattgtcatcatgggaggcggaactggactctcagttttattaagaggattaaagcaatatcctgttgatattacagcagttgttacaatcgctgatgatggtggcagttcgggtcgattacgtgatgagttagaaattccacctccaggtgacatccgtaacgtacttgttgcgttatcggatgtagagccactggtggaagctttatttcagcaccgtttcacaacaggagacggactgaaaggtcatgcgttaggaaatctattattggcaggtatgacctcgattacaggagactttttccatgcaattacggaaacaagtaaagtattaaatgtcagaggacgtgtattaccagcagcgaatcaaagtgcggtacttcatgcggaacttgaagatggagaaattgtaacaggtgaatcaaagattccttattacggaaagaagattaatcgcgtctttttaactccagaagatgtagagccattgcatgaaacgttggctgagattaaacgagctgatttacttgttttcggcccaggaagtttgtatacgagtatattacccaatttagttgttaacaaaattggagacgcagttcttgctgcaaaggcgaagaaggtatatgtatgtaacgttatgacacaagcgggtgaaacgatgggatatactgcttttgatcatgtgcaggcgttacacgatcatttagggcaaccatttatcaatactgcaattgtaaataaccgtgagattccttgtgaattacgtaagttatatgatgaagaaatgtctacaccagttgtagtggatgaagaacgttttgttgaaaataatattgatgttattcaagagggattagcgaagtatgatgatcatgttgtaaggcatgatacgttaaagttagcttcgattttatattcattgttataaatatgcgttgcctcgtttgaggtagcgctcctcattcatataggacaagaattttgttccgcaataatcgtataaggaggtgttgactgtgtcatttgcatcagaaacaaagaaagagttgacgaatcttgagatgaaggaatgctgtgagaaagcagaattatcagcgctacttcgaatgaacgggtcgctttctttttcaaaccgtcgtctatctatcgatattcaaacggaaaatgcggcaattgcaagaaggatttatacgcttttgaaaaaaggatatgacgtgacggtagaattacttgttcgtaaaaaaatgcgattgaagaaaaataatgtatatattgtgcggcttgttgagaagtctcgcgaaatattagctgatcttcatattgttcgagatgacttttcatttattcgaaatatatcacaagaattgattgagaagaagtgttgtaaacgatcgtatttacgcggagcatttttagcaggtggttcagtaaataacccagaaacatcatcttatcatttagaaatcttttcgttatataaggaacataatgatgctatatgtgaactgatgaacggatttgatttaaatagtaagacgctggagagaagaaaagggtacattacgtatttgaaagaagcagaaaaaattacagagtttttaaatattataggtgctcataatgcacttttaagatttgaagatattcgaatcgtacgtgatatgcgtaattctgtaaatcgtttagtgaactgcgaaacagctaatttaaataaaacaattggtgcagcactaaggcagattgaaaatatacgctacattgatgagacagttggtcttgatatattgccggataaactacaagagattgcacaattacgaagagattatcaagatgtaacattgaaagagttaggtgagatggtatccggggggaagattagtaagtcgggtattaatcatcgtttgcgtaaaatcgatgaaattgcagagaaattacgcgcgggggaaacggtagcaaaaaaataagaggttaaaggggaaatggagctgtggttcaaaaaagagttcaagtttcattaaaaaacggtttacaagcacgtccggctgcgttgtttgtacaagaggcaaatcgctttcatgcagatatcttcatcgagaaagatggaaagacagtaaatgcaaagagcataatggggattatgagcttagcaattggaactggaagcatgataacaattacaacagaaggttcagatgcagaagaggctttagaagcattagctgcatatgtacaataaaaagctatcgcgtatatgcgatagcttttttgttgtctgtgcgaattagcgaggaggggtatttaaggggtacgtgcttgtcgagaattgtcggtaagtcgataagttatgtcgaaacgtcgatatattaaaataatcgccgatataatcggagttgcggtcgatatatttgaaaaatcgctgatatatttagagagatactggatggggtatgtgagcggggaacaatatataaaagaagcgcccaattatagggcgcttccacttttagttgtatccagctccagcgacctgcgattctaaacgagccgctttcgcttttagttattaacgatttgtaaagattttatcgattaaaccgtattctaaagctttttctgctgtcatgaagttgtcgcggtctgtgtcgcgttgtagtacttcaagtggttgaccagtgcggtcagcaagaatttggtttagtttttcacgtaagaataggatacgttttgcagcgatttcgatttcagtcgcttgaccttgtgctccgccaagtggttggtgaatcattacttcactgtttggaagtgcataacgttttcctttttcacctgctgcaagtaagaatgcacccatagatgctgccataccgatacagattgttgatacttgtggtttaataaactgcattgtatcatagattgccatacctgctgtgatagaaccaccagggctgttgatgtagatgtgaatatctttttctggatcttgagattccaagaataaaagctgggaaacgattgagttagctacgttgtcatcaattgcactaccaagcataatgatgcggtcttttaatagtcgagagtaaatatcgtaagcgcgttctccacgatttgtttgttcaattactgtaggaattaaattcatctgttatttcctccttataaagctttcttagtcttataatacaattatggtcaataaaggtcaaacgaaaccactttaaatcaaaaaaatatgtagttgtaccatgaaatattcgctatgttttcgaaattccctgcttatgtatcttcaacatcataaccgaattacataaatttaaacgttatgaaaactggagaaaaaagaaaagaacgccttttaactgaagcgttctttcgataattagtcttttaaaagataggttactttatttaaaatcttttcgatttgtttcgcgtttttactatacatttcacttgctgatttcgactttgtttctaaggaaaatagttcaagatcagcatgacatttttttaaagatgctaataataaaggtttgttttgaggagaaggcatttggagtttgtcattgtaaatgtcgatagtaagttgtccgtatgaatccacttgaccgaggaagacattttcaataacaacaccgagtttttctaattctgaatgtagccaagcgcggttatgtccgcttgctgaaagaggttcatctagtacatttccatccataataacagtttgtggttctttctcgtttggtacttttaaaccgatgtcttttgctgtaagtggctgggaatctttctttaataatacatttaattctccgctcggttctaagacagcaaattcgacttcagctacgctgaacgcactttttccacggagaagttccagtaattcgtcactcgtatatttttctttctttaagttatcttcgagtatctttccgtcttttattaatacggtagatttcccttcaaagaagtcccgagctgttttgttctttaaagagaggattcctgttaaaaaaggtaccacagcgaaaatgagtatcgcaaagacgccgtgaaaaaattttgaatcgagccctgtagatacttgggcagcgatgtcaccaatcgtcattccggctatgtattcaaaaaaggaaagctgagagatttgtcttttccctaaccatttcgtaatagcgaataaaataattaatatgaatacagagcgaagaatgacaagtgtccattccggcaggtgagacatagtcgtttcctccagtctacttaaaaccctttatattgaggttcttcacgttctaatactgaaattctatcctttaaatcagcgatgacgctgtccatttctaacatacattcatgaaatacgcgttttgattcttcgtcttgtgaatttaatgaaagggagcttaaacttgcttgagcgccccttacactagcaaggcaagtttttacgctagcgataacagtcatataaacacctcttatcctttcggtttgaataacaatgctccaatgaagccgaaaataatagccgctgatacaccggcgctcgttactttaaacatgccggtaataacgccaacgatgccatgttttgcagcttcttccattgcgccatgaacgagggcattaccaaagcttgtaataggtacagttgccccggctccagcgaaatcaattaatggctcatacaaattaaatccatctaatatagctccagcaacaacgagtgttgccattgtatgagcaggtgttagtttgccgacatcaaacataagttggccgattacacatatgagtccgccaatgacgaaagcccagaaaaaaatcattgcgttgcacctccaaattcaatcgaaacggcgtgagcgatacacggaatcgtttcttcttgttggaatgtaagtggagatagtaaagcgcctgtcgcaacgacaagtatttttttgaactctcctcttttcattcggtttaataaatgaccgtacacgactgttgcagaacatccaggtccgctagcaccagctatgacaggttgtccttctctataaatgataattccgcaatcttgaaattgttcgctcgttactttcgttccgtgtttatgtagtaagtcataagcaatttcgcgtcctacatgtccgagatcgcctgttacgattaaatcgtagtaagaggcatcaatttgacgttcacgtaaatgggcttcaattgtatcaactgcagctggagccattgcgcctcccatattaaacggatccgttaatcccatatcaaccactcggccgattgttgcagaggttactcttggaccgtgtccagtatcgcttaatatagcggctcctgctccggttactgtccactgtgcagtaggcggcttttgtccaccgtattcggtagggtagcggaactgtttttctacagctgtattatggcttgaagctccagttaataaatattttgcaccttttgcatttacgatacttgccccaagtgctaaaccttccatagaagtagaacaagccccgaataatccgagataaggagtgcccagtgtgcggcaagcaaagcttgtaggggtaatttgattaattaaatctcctgcgagtacgaactgaatatcatctttacgaagttctgctttttcagtagcgcgactacaagcctcttcgaataaaattttatgtgctttttcataggaatcttgtccgagccataaatcttcatgaaggatatcgaagtcttctgggatgttcccctttgcttcaaatggtccaccgacaacccctgttgaaataatgactggtttgttttcaaatacccacgttcggtgtccttgtaacatttatagccctccccattgaacgagaatagttttaataagtgcgatgacgaaagcggaaaatacaccaaataaaataacagaaccagctagtttaaacatattaccgccgacaccgagtacaaaaccttccgttcggtgttcaatacacgcggagataacagagttaccaaatccagtgacaggtacagctgttccagcgcctgcaaactgaccgagacgatcgtatacaccgaatccggttagcaacattgagataaaaatgagagttgcgactgttggatttcctgctgagcgttcggtaaaatcgaaatacgtaatataaaaagttgatatcagttgcccgattaggcagataaaaccaccaacgaaaaaggcctttaaacaattttttagaacagggcgtttcggttcgcgttcttgctcaaattttttgtattcctgttgtacaggggttaagtttttatctttacttgacattgcaatccttccttttctattcgaaagcgttaagtgttagattccatttctgatccgattagctttaactgttttttgatctcatctttagatacttcttttttcttaattttgtttgcaagcttttcgagtaacataaagatttttttatctgtactaacacgaacatcgaaagtaggatattcatcacttagttgcttttgaagtttcttgcgcaaaggttttaatccaaacctttcatgatgctcaggtataaccgctatgtagagatctaaatttgaattcactgctgcgctttttataatttcatccatagcgagggcctttttcttagctccttgcgatatagattgattaaaggattctgtactcatctttgttaattttggacccttttctttttctgttcgttttgtttcttctttctttacctttttatctaatgggctatgatcacaaccggtaaaagaactaaatagaagtataaataacgcggttataagtccaatctttcgcataatcatcattccatttctattgcaatatgtaatgtgatagaaaaaggatgactgcatatcatcctttttctatttcacagcaagactgattcgttattgctgtgagtattgtggttcttcttgttggacttcttcaacacgtgggtttaaagaatcgataatcgtttgtgtttgctgcgcagctgtttggaaaagttgcttagcttgttggttatccgtatcaagagcgaatccctctaagctagcttgtgcactttttaatccagaaacagtctgctttaattttgtaattacagtcattgaatgaagccccctttggaatatcaattcaaagattataatttgtgagttggggagaatttatgattggaaaatttaggggtggaatggattttatatgcttttagctaagatgcataaggtattacggggatatttttattgatttagatggattttattgctattattatgagaagaaaatgaagtgttttctataatcatgcgcccatagctcagtcggatagagcggtggtttccggtaccacgtctgccgggggttcgaatccctctgggcgcgcttttagatttttaaataatcacatgttttttcttaaaaccttgatataactggacttatataattttgtaggaactatctatttcaaataaacttatacgtttagaattttttttgcacgatttttgcacgttttatataactgattggaacaaattcaacatagtttgatcaacgattctagattccttttgttccatttcatctaagacatgtgaatatgtttgtagtgtaattacaatatctttgtggccaagtcttcttgaaatgtattttatattaacgccattgtataagagtatagatgcatgtgtatggcgtaatgaatgacatgttattggtttaacattgcaccttgcgcaaatctttttaagaactttgtttacagcgttatttgttataacttccatttgattattaataaagcacaaatttttagtattccttaaacctgttttcagagcatgttctttttggtgtttttgtaaatcttttaacatactcactgtttcctgatcaattgttattgtacgtacagattgataatttttagtgttaccaaagtcattcttatcacgataatcccaagtcttattgattgtaattgttctttcttctaagtctatacagtcccatgtcatccccattatttcaccaaatcttgccccagtggctatggcaaaaagaattatatatcttgaaatgtattgtggtgtcaaatttgcgcgtaattcatccactatgtttttcatctcttcttgattgataaactttaattcttctgattttgtttcattctctccatgtatgatagctttgtaagtagggtctctatgcaaaattccatcttcaattgcatattttatacatgctttaacacagttatgttttttcttgacggtcattttagcacgttttttagataattcatttaaaaagttttgatataaaactctatttaagtctttcatacggacaccaataaaatgttcttcgactaattttacagattgtaaaaggtttttctcatgcgatagactatgttttccttttttatatacttcaaaccattctctcatatactcggagaatagtttatcttctgcatttaaattatgtccacgacttatttttttttctaattcacttgctgcaattgctgcttcctttttggtcgagaatccaccttgggtttttgttttgtatttatctccatctttataagaaacgcgatacctccaaccagttgctcttttttcaaagcttgccaagtttttctcctccattcaaaataaaattcgctaaaacttttgaatgtttatatgtgtatcagttaagaaatgaactaagtaatttttatgataaaaagatactccttttgtcatccggatatattcaaatgcatctataacacaagccgttgtaacttcaagttcttctgctatatcccaaggtgtttggatgcctttttcatagcatagtattaaagcatcaattgtaacaattcggaggcagcctatttttcgggcttggaattcttgctgacgttcggtaatagtttcctgtttaattatattacctatgcctttctcaaagtgagctatttcctcactaactgttacgtacttttctgcaatggtttgattaagattattattgatatatatttcactaccaacacaaagtccacttaacccattaggcatctcattattaaagttgaaagttatttctggatattgtgctataagtgtttccaacttgttcatataaatgctcctattttcttttacttttaacaaaattaatgaagtccattacctcttgtagttcttctttgcttagattatcttccatgtgagctgcgattaccatatgaggatcatcttctgtttcctgatccttgtttatagtgataatccctgatacatcatcatcagtaattctttctcctttttccagcttttctgctatcgtaaagaaactttggggacttacctgtaatgcctttgcataattttgtatatctaactcatcaagtgtgctatttctattttcatgaccagatatggtgctttgtttataaccagtaactttttctaaatctttttgagtcattcttctgtatttacgtaaatatttgatcgctggacccagaatattttttttcaatttcaagtgacctccatccattgatacgataaggatagtatactctaaaataacgcgtgacacaataaaaatattgtacatcgtaatattatttttgtgtatagcttgaataatatcgagatatgcgatattatttggtcatcggataattcggaggtgacacaatgactgttaaagaagaaattagaaagaaatatttaaaacctaaacgaattttaaaaagagaaagaatggcacgtgatatcacgattgcagaaatggcaattgcattgggaatcaatagagacgcatactctgcgaaggaaaaagggaaattttcattttcggattatgagatgcaagttattaaaaaaaagttaggattaccaattgagtatcttttttttatagattaatatcgagtatctcaatattatgaggaggattttaagtgaaaaaagaaaaaacatggtgggaaatgaaggatttaaaaaaagctactggatatagttatggttggttaacacaaaatattctttacaaaccttgttataaaaaaatattggatattaataacggtggttttgtttattacccagagtctagagggaaaaagtggttgtttatagctgatagaatgcaagagtttcttgaaaagcattttaatcagattgtgagtagataaaagcaagttaacttacatatatccattaagtcaataaatcttaaggagagtgaaaagcatgaacggagtactattagcaacacgaattatgaaagggcatgaaattgttaaaaaatgcgcagaagtaaaactaagttatacgaaatgaaccgtaaggtttcagatcgaagggaggtgagttaattgaaaaatggtaaaaagccaacaaaaaaagaaaagattcatattaaatcatacaatttgaatcctgataattggttgatttttaaaaaagtaagtaatgaattgcatttggcgcatcgtaatacgaataaaactaaagttattccgaatttgtagaggaggaaagtaacatgaatcatttaacagtagcaaacgaacaagcattagtatttgaaaacaacggaaaagtagtaacagatagtctaatgattgctgaaatgtttgtaaagacacatgacaatgtgttgaaagatattagaaaacaaattgaatatgcaggacctgaattttcactcgtaaattttcacgagtcaaattatgaaaatgagcgtgggcgaaaataccttaagtataacttaacagaagaagctttcacgctagttgcaatgagttataacacaaaagaagctgttcaaatgaaaatcaagtttattgaagagtttaaacgaatgaagcaacataattgtcccctgtgcaatacagagttcaatccttagtagctgcttaatatatttgtctaattttttgggttcagttcattttgatagtctttttttgttgtatggattgaattatataatgtattgcaaatagaaataatagaagtaatgcggaaaggcggtggggggaaatgaaatatccagaccatttagtaaaacaagtgcaagagcgcagtgctccttatcaactagaaggttttttaagtggacaaggtcctgaaaatcccaaatttatgttgttaggagaggcgcctggtgaaacagaaattcataatgggattccgtttagcgggagggcgggaaaacaattaatggattttttagagcgtattgatgttacaagggaagaagtatatattacgagcgctgttcgaagtagaccttataaatggcgagagaaaaaagaacgaaatggtgaaatcatacaaaaaaagtataatagaacgccaaatcagggagaaatagttgcccatgcgcctttgttagattatgaattagagaaaatacatccgaagcttatcgtcacgcttggaaatatcggtcttcaacgtttaacaggaaaaaaaaaaacaatcacagatgtacacgggcaattattaaaacagcccattcaaaaattaaaggatatgcaaagtgcagagtttacatggtcagagaaagaatatcatgtttttccgacttttcatccagcttccattttttataatcggagtttattggagcttattcatgaggattttgagaagcttaaaagacttgtaataaaaaactagaaaagctaaggcgcttttctagttacatttaattatgtaaagggtttttattttcatctaacgtaaatccttcaccaactacatcatgtacatcacttacagcgacaaaagcatgaggatctacagaagtaatgatattctttaatttcacgatttcatttttagcaacaacgcaatacaatacgttacgttccacttttgtatacgatccaacagcttttaaaaaggttgctccgcgctccatttcagataaaattttggcagcaatttcatcgtttttctctgagataatagtcgctcctttggcagcataagctccttcttgcataaaatcaatgactttagcaccgataaaaacagcaactagcgtatacatgccctcgcggtatgataaataggtaagaatagagactacgataacgacagcatcaaacataaacattgttttccccatactccagccaacatatttgtgagctagtcgtgcgataatatctacaccgccagtagtcccgccatatttaaatattattccaaggccgataccgataaatgccccggcgaataaagctgcgagtgtcatatcattttgcaagtttaaatgtaagttgagtacttcgtaacgctggaaaatccatagaaataaagatacgctaaaggtgccaattaatgtatataaaaatgtcgttctgccaagtaacctccaaccaataaaaaatatagggatatttaaaattaagtttgagtaggaaggatcaaacttaaataaaaaatacaataatagtgtaataccagtaaacccaccctctgcaaggtggttttcaatattgatattgacaataccgaaagaaaatatagcggaaccgattaaaataaaaataatatttcgcatcttcaattttgatgtcatatagaaatccccctaattatgtaatgattgcattgctccgctgaaacagtaaaacataataataagtaatttctagttgctagtgaaaatagtaagaacttgattgatgtgggctgatcttttgtgaaaagcacaaaagaaggtttcacgttatcccgctctaacggctgataggagatgaagcaaagaagaggggcaaaccagccgtaggaacccgattagttcaactaatcttttgcaaaaaaacgcaaaagaagtttcactttattatagtctatccaaaaatgggtcgcaaataggtgtttggcggggaataatatttgtcaaatcgcgatgaattggctaacatgaaagaggaaggattagaggtgaatagtatggaagcaaaaacgatgaaagatatgcagaaagaagtagatgcatatattggtcagtttaaagaaggttatttcagtccgcttgcaatgatggctcgtttaacggaagaaatgggagagcttgcaagagaggtaaatcattattatggtgagaaaccgaagaaaacaactgaaaaagaaagaagtattgaagaagagcttggagatgtattatttgttatgatttgtatggcaaatagtttaaatattgatttagagacagcacataacattgtaatgaataaatttaatacacgtgataaagatcgctggacacgtattgatgagggagagaaagaataatgaaagaaattaaagtaattatcgccggaccaagaggacgtatgggacatgaagcagttcttcttatggaaagaacggaacattttaatttagtagcagcagtggattataagcatggtggtgagaagatttctgatttacctggcatgccagcattacatgcaccgatttacgctgatttacatacttgtttagatgaagtagaagcagatgtgttgttagatttaacaacaccagaagtggggaaacaacacgttacacttgcagttgagcgtggacttcgttcggttattggtacaactggatttacagaagaagaattggcacgtttaacagagaatgcaaaagaaaaagcagtaggaacaattattgctccaaactttgcaattggtgcagttcttatgatgaaattctcacaaatggcagcgaaatatttccaagatgttgaggtaattgaattacatcatgatcaaaaattagacgcaccatctggtacagctgtaaaaacggtagagttaattcgtcaaaatcgtgaatcaaagcagcaaggtcatccaaaagaagtagagcaactagcaggtgcacgtggtgcaaatgtagacggtattcacattcatagtgtacgtttgccagggcttattgcacaccaagaagtaatgttcggtggagatggacaaatgttaacagttcgtcatgattcattcaatcgtgcatcatttatgtcaggtgtaaaactatcaattgagacagtaatgaaccttgatcatcttgtgtacggtttagaaaatattatcgactaaaggggagacaacggatgaaaattgccttaatcgcacatgacaaaaagaaaaatgatatggtttcgtttgcatacgcatataaaccaatttttgaacaacatgaattatttgcaacaggaacgacagggcttcgtattatggaagcgactggattagttgtaacaagatatcaatctggccctcttggtggagatcaagaaattggtgcaatgattgcaaagaacgatttagatatggtgattttcttccgcgatccattaacagcacagccgcatgaaccggatgtgaatgcattgcttcgtttatgtgatgtatatgcgattccacttgcaacgaatatggcaagtgctgaaatgttaatgcacgcattagagcgaggagatttagattatcgtaagttaagaaaatgaggggaacaattatgagtggattacatatattagcgtttggtgctcatgccgatgatgttgaaatcggcatggctggtaccatcgctaaatatacaaagcaagggtatgaagtaggtatttgtgatttaacagaagctgatctttcttcaaatggaacgatagagttgagaaaagaagaagcgaaggttgcagctcgtataatgggagtaaaaacgaggctgaatttagcgatgccagaccgtggtttgtatatgaaagaagagtatatacgtgaaattgtcaaggtgatccgtacatataaaccaaaactagtttttgcaccgtactatgaagatcgccatccagatcatgcaaattgtgcaaagcttgtggaagaggctattttttcagcaggaatccgtaaatatatgccggaactttcaccacatcgtgtggagtctttttataattatatgattaatggttttcataaaccgaatttttgtatagatataagtgagtacctctctataaaggtggaagcattagaagcgtatgaaagtcagttttcaacagggagcgatggtgttaagacaccgttaacagaaggttacgttgaaactgtaatcgctcgtgagaagatgtttggaaaagaagttggagtcttgtatgccgagggatttatgagtaagaaaccggttttattacatgctgatttattagggggatgtaaatgaaattaaaaataggtattacatgttatccttctgtaggtggttctggagttgttggaacagaattaggaaagcaattggcggaacgtgggcatgaaattcactttattacatcgggtttaccattccggttaaataaagtatatccaaacatttattttcatgaagtgacggtaaatcaatactctgtatttcaatatccaccatacgatttagcgttagcaagtaaaatggccgaggttgcacaaagagaaaacttagacattttacatgtgcattacgcaataccacatgcaatttgtgcatatttagcaaaacaaatgatcggagagcgtattaaaattgttacaaccttacatggaacagatattactgtgttaggttccgacccttcgttaaataatttaattcgttttggtattgagcaatcagatgttgtcactgctgtctcgcattcattaattaacgaaacacatgagcttgtaaaaccaagtaaagaaattcaaacggtatataactttatagacgaacgtgtatatttcaagcgtaatatgtctcaattaaagaaagaatatggtataagtgagagtgaaaaagtacttattcatatttcgaatttccgtaaagtgaaacgtgtgcaggatgttgttcaggcatttgctaaaattgttaaagaagtagatgcgaagttgcttcttgttggagacggaccagaattctgtacgattttacagatagtgaagaatttacatattgaagatcgcgttttattcctagggaagcaagataatgttgcagaactacttgcgatgagtgatttaatgttgcttctatcagagaaggaaagttttggtcttgttttattagaagcaatggcgtgtggtgtaccttgtatcggaacgcgggttggaggtattccagaggttattcaacacggggaaacaggatatttatgtgaagttggcgatacaacaggagtggcaaatcaagctattcagctattaaaggacgaggaacttcaccgtaatatgggagaacgagcaagagaaagtgtttatgagcaatttcgctcagaaaaaattgtttcacaatatgaaacgatttactatgacgtactaagggatgacaaaaatggaaagatttaaaaaagctagttctattattgagacattaaagcaacaaggacatgaggcttactttgttggtgggagcgtacgagatcttattatcgataggccgattggagatattgatattgcgacatctgctctaccagaagaagtgatggctatattcccaagaaatgttcctgttggtcttgagcatggaactgtaattgttgtagaaaatggtgagccttatgaggtaactacttttcgaacagaaagcgaatatgaagattttcgaagacctagtagtgttcaatttgttcgttcattagaagaggatttaaaacgtcgtgatttcacgatgaatgcaattgctatgacagaagaaggcaaaatggttgatttatttgctggacaggaagccattcaacagagagaaattgtgacagttggaaatgctgcggatcgttttcaagaagatgccctgcgaatgatgcgtggtattcggtttgtaagcacgttaggtttttcattagaaatgaaaacgaagcaagcgattgaaacgcatgggcatttgctagaacatatagcaattgagcgtattacagtagagtttgagaaactgttaactggtacatattgtgtgaaaggtctcaaagaattagtagagacgaagctattttctcatttgccatatttacaaatgtcagaagagagactgttaaaagctacgcagtataaatgggattctttcgaaacggatattgaggcgtgggcatttttcttatattgtatcggagaagaacatccatctgtctttttacgtcaatggaagttttcgaataaaaaaataaaagatattgttgcagttttattggcaattcgtactagaaaggagaaggattgggatacagtccttctttataaaacgggaattcatatcgctgaaatggcagagagagtatatgaagcgatgattgaaagctatgaccctacatctgttgaacgagtacaattaatgtttcatgcattgccaatccaggaacgtcaagaaatgaatgtgactggtaatgatttattaaactgggcaaacaaaaagcctggtccgtgggttgctgaaatgcttcagaaaatcgaagaagcaatcgtacaaggaaacgtagttaatgagaaagagcgtataagggagtggctgcaaggatgcaatctactataagaaagcagttattgcaagttttttctgaagcggatggcgagtttgtatccggccaaacaattagtgataaacttggttgttcaagaactgctgtgtggaaacatatggaggatctgcggagtgagggatatgaacttgaagctgtgcgccgattaggttaccgaattgcaagtaagccagacaaagtgactgctaatgaaattcagttagggctacaaacgaagcggattggtagaacagtgtattttgaagaaactgttgaatcaacgcagcacattgcagcaaaacttgcttatgaaggtgcagaagaaggaactgtcgttgtagcagaagaacaaacagcgggaagaggtcgtttaagcagaaaatggcattcaccaaaaggaacagggatttggatgagtattattttacgcccgtcaatcccagttcatcatgcaccgcaacttactttgttagcggctgttagtgttgcacaggcaattgaaaaatgtacaggtgtaaacgtaggaataaaatggccaaatgatattttaattcaaggtaaaaaggctgtaggtatattaacagaaatgcaagcggatcctgataaaattaatgctgtcattatgggcatcggtattaatgcgaatcaaaagcaagaacattttgatgaagaaattcagcacatcgctacttcattagcgattgaatcaggtaagccgattgttcgtgcagaacttatgcaacaaatctatttacaactagaaaaattatatgaagaatatttacaaaatggtttctctgtcattaaaattctttgggaaagttacgctgtgagcatcgggaaagaaattaccgctcgaacgatgagagagacaattacggggttagcaaaaggaatcacagaggatggtgtattacttctggaggatcatgaggggaaagtacatcatattcattctgcagatatcgaaattaagtaaaagaagttcctcttttggaacttctttttatttcaatagttttgagttgaatttgtaacatgataataaattcttttcatatttaaagttcatttcaaaatagcttccgtcgagttgacctggcatgttatttgacgattactttgcctgtcattcctttaagaagatggtatcgacatattaattcatatgtaccagtatttttaggtttcacggtaatattcttttcttttcctgactggactacgacgtcaataccgagttttttcactgtaaaggtgtgctcgtttttacctttatttttcaatagtaatgttgttgatccttcaagcggaatcgtgatgacatttggattaaagtaatcatcatttagttcaacctcaatcactttcgttaaatcggtgggttgtgttacgacatgaactgaggcaaatacttgggaggatcctaaagacatccaccatacaatcattacaagcaaactgctgaatcgaaataaccacctgttcatagacatctgcaattctcctttgttaagtactttcctcaattaacctgcatcattagtttaagagttatactatatagttaaattgattacagaaaaaattaacttggacttttttaacatgcgttgaaaaaacatgtatcttttcaggattgaattatccataaaaactgtatagcatatatactctcgtgttaaatttcatataccgtaataagaataaaaaattattttttcgaaaaaatgtagtaattcctttttgtagtttgctataattagttcgaatgtgggcagtatcagagcgaactgcaccatgattcgaagtcatacgaaaaataataacttggattctgccttgatccaataacggactgggacagagggatgaataatgccgactaacacacaacccttctgcccttttatggccagaggggtttttttatatgatttcggccatctcctctctcctgcataaaggaggagtagtttttgaaaacaaaaacagattttttgaagatgaaagagcaaggtgagccgattacaatgctaacggcgtatgattatccatctgctaaattagcagaagaagctgaagttgatatgattctagttggagattctcttggaatggttgtactcggatacgattcaacagtacctgtaacagtagaggatatgattcatcatacgaaagctgtacgccgcggagcgaaagagacgtttattgtaactgatatgccatttatgtcgtatcacgtatcattacaagaaacgatggtgaatgcacgccgcatcgttcaagagagcggggcacacgcactgaaggtagaaggtgctggagaagttatatcgacgattcaatatttgacgaacgcaggaattcctgttgtagcgcatttaggtttaacccctcaatctgtaggagtgttgggtggatataaagtgcaaggaaaagatgcggagagtgcaaaaaaattaatagaagatgcaaagaaatgtgaagaagctggtgcaatagcgcttgtgttagaatgtgtaccaatgcagttagcagaacttatttcagagcaactaacaataccgacaattgggattggcgcaggacaaaaagtagatgggcaagtgcttgtttatcatgatcttatctcatacggcgtaaatcgtgttccgaaatttgtgaagcaatatacgtctgttcaagaggagattgtgcgtgggatttcacaatatgttactgaagtaaagacaaggcaatttcctgaagaaaaacattcgttcacaatgaaagaggaagaatgcttagcgttatatggaggaaaacaataatgaaaatcgtaactacagtgcaagagatgcagcaaattacgagcgaacttcgtgcaagtggaaagagtattggttttgttccaacaatgggttatttacatgaaggccatgctactttattacgtaaggcaagagaagaaaatgaaactgtagttttaagtgtatttgtaaacccactacaatttggcccaaatgaagatttagatcgatatcctcgtgatattgatagagatgaaaatgtagcaaaagaaaacggtgtagattatttattttatccgagtgtagaagaaatgtatccagcagaacaaacaacaacggtagaagttgtgaagcgcacggacgtattatgcggtcaacaaagacctggtcattttgctggtgttgcaactgtactaatgaaactatttaatattacgctgccaaagcgtgcttatttcggtatgaaagatgctcaacaagttgcagtaattgaagggtttgtaactgatttcaatattccagttacaatcgtaccagttgatattgtaagggaagaagatggtttagcgaaaagttctcgtaacgtgtacctatcacaagatgaacgtgaagaagctcttcatttataccgcagcctatgtatagcgaaagaaagaattgaggcaggtgaacgtaatcccgaaatcattacaaatcttgtgaaagagtatattgagacgcatacgaaaggcactgtagattatgcagatttatatgcatatccgtcattaacaatggtagagaaagtcaaaggaagaatcattttagctattgcagttaagtttgaaaatgtaagattaattgacaatataacattaacagttaaataagggggagcatctatgtttcgcacaatgatgagagcaaagttacatcgtgcaactgtaacggaggcaaatttaaattatgtaggtagtattacaattgatgaagacttaatggatgcagtaaatattgtagaaaacgaaaaagtccaaattgtaaataataataatggtgctcgcttagagacatacgttattaaaggggaacgcggtagtggtgttgtttgtttaaacggtgctgcggcaaggcttgtacaaccaggggacaaagtaattattatttgttatgggctagttacggaagaagagattcataaacaagaaccaaaaattgcagtattagacgataataatcaaattattgaaatgttaggtgctgaaaaagcgggtacgatattataagtagaaaggctatctccattgcggagatagcttttttgtgcatcttttcattaagatgagataaaacgtggtatagtaacattatataaattattgttgtttgaaaggtaagaaattgaggtgttacatatatgagtaagcgttatgtcgttgttgatttagagacgacagggaactcctggaaagatgggaaggataaaattacccaaattgcagctgttgtagtagaagatggagagatattggagattttttcgtcttttgttaacccaaagagagagatcccaccatttattacagaattaacagggattgatgaaagtcttgtaaaacaagccccgttatttcaagatgtagccccgatgattgttgagctattacaaggtgcggctttcgttgcgcataatgttcactttgattggaattttttaaatgaagaattaaggcaagctggatatacagaaatacattgtccgaaaatcgacacggttgaattggctcaaattcttttgccgacagccgatagttataaattacgtgatttagctaagaagcatgaactagagcacgatcaaccacatcgtgcggatagtgatgctcttgcaacagcggaattatttttacaatttttaaatgaaattgaaaagttaccacttgtcacgttgcaatcgctttatgaattaagtgatgtgttccaaagcgatatagctgatgtgctttctgaaaatattttaaagaaagtaatgcacggtaaagaagatatagcggagtatgaaatacatcgaaatattgcgctgaaaaagcggaactattccttaaaccttggagaaacgtgttcatcaaagtttgatgctttcttgaataaaacgatggataaattggaatcacatatgccaaagtttgaaagaagagaaagtcaacaactgatgatgaaagagatatatacggcgttaagagattctcgtttttcactaattgaagcgggtacaggaacaggaaagactcttgcttatttgcttcctagtctttattttgcaaagagaaaagaagaacctgtcattataagtacacaaacggtacaactccaacaacaaatattagaaaaagaaattccgttattacaaaaaataatgccattttcatttgaggtagctcttctaaaaggaagaaagcattatttatgcttacataaatttgagtatgctttgcaagaggaagaaaaaaattatgatatggcacttacgaaggcgaagattttagtttggctattgcaaactgaaacaggtgatcgagacgaattaaatattcctgagggcggaaagttactttggaatcgtatttgtagcgatgcgtatagtccaggcggtatgcaaagtaattggtttagtcgttgtttttatcagcgagcgaagaataaagctttatttgcagatatcgttattacaaatcatgcgttattatttcaagatttttcaagtgaagaaccgttgtttgcttcatgcgaacatattatttttgatgaagctcaccatattgaagaagctgcgagtagaacattgggtgaacagttctcttgtatgtattttcaattggttatatctcgtcttgggacgctagaaacagaagatgtactctccaaagtatataaaatgatgaaaaaatcagagcaagcatctcgttcaactttccgtatgataagttatagtttgaaggaacttaagtttgatgcggatgaactcttccaaatgttacgtacttttatatttaaacaaacaaagcaagagcaaggaacgaataatatgccgctcatctataggtataacgcagaactagaaaaaggtaagttgtgggatagtatcgtcgaattaacaaatcgttttatatatgaattaagaagggtagtaactgctcttgagaagcaagtggatatattgcaaagtaagttagaatgggagatgcatgttgtaacaggtgaatttatgcatttaattgagttgctgagaaagatggcagaatcattacagttactcgtattagaaaagaattcgtatgtaacttggatggagactgaaacgaaagggacgattcattcaacagttctatacgcacagcctgtccatattggtgaaagatttgctgatgaatttttaacagaaaaaaagagtgttatttttacatccgcaacactaacagttaacgatacgtttgattatataaaagaggaacttggtttacatgatttcgctccaaatactttaaaggttccgtcaccatttcgttatgatgaacagatgaaattaatggtttcaacggatgtaccttttattaagcaagtaagtaatgagcgatatattgaatctgtatcggaacatattgcaaagatagcaaaagccacaaaaggcagaatgctcgttttattcacttcgtatgaaatgttaaaagaagcgtatgcgaatttaaaaaataatgatgaattagagggttatttattactcacccaaagtgtgaataatagaagtcgaagccgcttaattcgaaagtttcaagagttcgacaaatcaattttattagggacgagcagtttctgggaaggaatagatattcctggagatgccttaagttgtcttgttatagtccgtctaccatttacacctcctcatcagccgatgatggaagcgaaaggtgagtggctaaaaaatcaaggtgaagatgtattcgctaaattagcgctcccacaagcaatattacgtttcaaacaaggattcggccgcttaattcgaacgaatacagatacaggaacggtagtagtgttagatcgtcgtttgacgagttcttcctatggaaaacgatttctacaatcgattcctaacgtacctctttatgaaggaccattagaagaattgttagtacaattagaagaaccatcaaatgaataaaaatggaagaaaaatacgcctgaagtacttataaacttcaggcgtaaaaaatgtgggtaggaggaattttattttttttacttcttgtatacaaaatgtgttggttttcgacttgaaacctttttttgctgtacatgtcctgctataatagatgggtgatgaagcaggggttgtaaagaatgtactcttattgtaaccgcattgcgttcttctataattagaaatttttgtgtaacggaggagttttttcatggataagaaaatcgaagtactatcaacgacgcgtattaaatattcgtcggatttgtataaaattgttgatagtttaaatcgtacgttaaaagagcaggacctcatgttcggactagcattagacgaaaaagataaagaaacagctgtatttacgatttacagaacgtagtgatacaatgaaaaagtggatttttgcaatcattattgttatcgttgctagcggaatatatggggcgtatgtttataataaagcgatgggaaagaaaattccaaaagagtcgaaatttgtagaaattgctaaagaaaaagcaaagcttacaaaggtgaaatctgttgattattacaacggaaaatctgcatatatagtcgtgcaaggtacagatgaaaagggagaacaacttatcgtttgggtgcctgagaaaaaaggggatactgtagtaaggaaaaagagcgaaggtatttctgaaaaagaggctatacaaagaacaatagagcaagtcggcaatgaaagtaaggaatcaaaaagtaagccgaaagagattatgaaagtgaaattaggctttgaaaatgatgtaccactatgggaagttacatatattgatgatgacaatcgttatagttattactatcttgaatttaaagatggaaaatttttaagacgatatagcattgaaaaatagatgtagggggaactacaaatgaaattagcaaagcgagtagctgctttaacaccgtcttcaactttagaaattacagcaaaggcacaagcattaaaagcagagggtcatgatgtaattggattaggggcaggggaacctgactttaatacaccagagcatattatggatgctgcacataaagcgatgttagaagggcatacgaagtatacaccaacaggtggattacaatcgttaaaacaagaaattgtgaagaaatttactcgcgatcaaggtattgcgtatgatccatctgaaattattgtatgtaatggtgcaaagcatgcattatatacattattccaagtattacttgatgagggagatgaagttatcatcccaactccttactgggtaagctatccagagcaagtaaagcttgctggcggtaagccggtttatgtagaaggtttagaagacaatgagtacaaaattacagcaaagcagctgcgtgaggcaattacagagaaaacgaaagcagttattattaattcaccgagcaatccaacaggaatgatttatagcaaagaagaattacaacagcttggagaagtatgtttagaacatgatattttaatcgtttctgatgaaatttatgaaaaattaatttatggtggcgtagaatatacttcaattgcccagctttctaatgcattaaaagaacaaacacttattattaatggtgtatctaaatctcattctatgacaggatggcgtattggatatgctgcaggaaataagcagcttattaaagcaatgacgaatttagcgagtcatagtacgtcaaaccctacttcaatcgctcaatacggcgcaattgcggcatatgcaggctcacaagaacctgtggaaacaatgcgtcaagcctttgaagagagattaaacatcatttatgataaattaattcaaatccctggctttacttgtattaaaccgcaaggggcattttacttattccctaacgtaaaagaagctgtagctttatcaggatatgcaacagttgatgattgggcaaaagctctattagaagaggaaaaagtggctcttgtaccaggtacaggatttggtgctccaaataatgttcgtttatcatatgcgacatctcttgaacaagtagagaaagcattagagcgcatccatacatttatgaaaagtaaagtgcaagcttaattttatatttcattcatgtaatataaaaaacctccctattaatggggaggtttttttgacggattgtggcaaaaagaaatagctaaaggtgtgttatactagagagcgaggtgtttggtgatgaaaaagaaaatgatgttacagtggtttgagcagggaagcattgcaattccaaaattgcttatgatgcattataaaaaattaggtttaaatgagacggaatttatggttgtacttcatgtacacacatttttagaatcaggtaattcgtttccgactccttcagagatttctgaacggatgacgataacggaaatgaaatgtatggaagtaattcagacgttgattcaaaaaggttttttatcactagaaggtggacaaagatcagaagcgatgatgtgcgaaagttattctttacaaccgttatgggaaaaaatattacatttcttaatggatgaatcaatagaggaagagcaaaaagaaaaaaaacagctacaagtaaatttatatacagtatttgaaaaagaatttggaagaccactttcgccgttcgaatgtgaaacgttagggatgtgggaggaccaagatcaacatcatccaaatttaattcaagcggctcttagagaagctgtaatgagtggaaaactaaatttccgatatattgatcgtattttatttgagtggaaaaagaatggaattaaaacggtagatcaggctcaaaatcaaggtcaaaaatttagagcgaatcaacaaagggcacaacaaatgacaaaacaagagacgaaatttactggaaaagtgcctttttataattggttggagcagtaatataggaggaaaaatatgcttaacaaaacgcaaatccgttattgtttagacacaatggcggatatgtatccagaagcacattgtgaattggttcatgataatccatttgaacttgtaatcgcggtggcgttatctgcacaatgtacggatgtacttgtaaataaagtgacaagaaatttatttcaaaaatataaaacaccagaagattatttaagtgtttctctagaagaattacaacaagatatacgctctatcggattgtatagaaataaagcaaaaaacattcaaaaattatgccgaatgttattagatgactataatggagaagtaccgaacgatcgagatgaacttacgaaattaccaggtgtaggaaggaaaacagcgaatgttgtagtttccgtagcgtttggaattccggcaattgctgttgatacacatgtggagcgagtgagtaaacgattagctatgtgtagatggaaagactctgtgttagaagtagaaaaaacattaatgaagaaagtaccaatggatgagtggggagttacacatcatcgtatgattttctttggacgttatcattgtaaagcacaacgaccgcaatgtgaggaatgcagactgttagaagtatgtcgtgaaggaaagaagcgaatgaaggtgaaataaaggatggaacgagttatagaaataccgaaagaatttcactgtttaccattttttaaagaaagtgtaaatttaattaagtatcatacagacaattcttttgaagagataatacaaaatacttactttatatttgatattgaaagacagtatgagccatggaaggaaattgaaaacagcattccagtgatgttgaatgtatggaaaaataagcatgaagacattgctatactgtttcgaaatagaaataagcaagaggctgagggaccaatgattctttttgcagctcacttgttatcggttgtctattggctaaatgaacaacctgttcatagtttgaatgaaatgcaaataaatacgaataaattaaaagtgcaacctgttaattttatggaaagatattcattcattataaagaaaccgagtaattatcattcttatattcaattagcgcagttgtatatcgaaatagaaaagctgtatgtaaagaaaatgataacaaaaaagaagtccgcttctcgttaagagaaacggacttctttttttgtatattaggactctgttgtaacaacagcaccgtctgcgtgaggtgtatctcctccgggattttggtgttgctgttcttgttgtttcttagcctcttcttcagcttttttcttggcctcttcttcagctttcttcttagcttcttcttcagcttttttcttagcttcttcttcagctttccttctagcttcctcatcagctttcttttgagcttcttcttgctgtttacgttgttgttcttgctgttgctgttcttgttgtttcttagcctcttcttcagcctttttcttagcttcgtcttgttttactttatcttcattagcctttttctgggcttcctcatcagcttttttcttagcttcttcatcggcctttttcttagcctcttcttcagctttttttgcatctggagttccgccaggcgcagtgaaggatgcaccaactgctgggcttgttccagtgccttttttcgctactacagagaagctgtaagtaacacctggtttaataccaccaagagtagctgtcgtaccacttattgataggctaccacttgaaccgtcagttgctttatagctggctgcatatgcatcaacttctgctggtccagaccagtttagtgtaactgtgctagcgccatcaaaagtgacattcagaccactaggagcatctactttaatttgtttaattgcatcttttttcgcaccttttacgtataactctccgtttatttcttgtacagaagaaggacgttcaaagcgtgatttatctgtagcgaatttgctcatcattacttggaacatttgctgtgcaattctagtggagcgatcgctaacataattttttggaccatctttttcgtaaccggtccaaacagccattgtgtattgtggcgtatatccagcaaaccagctatctctgtttgcatcagctgggatgtcatatttttgaagaactgattcatcaaagttttgtgttcctgttttacctgctacgtcaacacctgaaacgtatgctgttggacctgtaccaccagaaccaggttttactacgtcacgaagaacgtcagtaaccatataagctgtatagtcttgcattgcgcgatgttctttcggtttaaagcttttctttttcccgtccgggaaggttacttcttttacgaagtgtggtttattatagttaccactattaccaaaggttgcatatgcacctgctacttctaatggagaactatcgttactaccgattgctgttgattcgtagacttttccttctttaaaggtcatgcctaaaccttcagcaaattcttttgacttattaagaccaactgtttgtgctgtctttaaagctggaatgtttaatgattttttcaaagcttcacgtagtgaaacgtcacctttgtaactctttgttgcattttgtattttcttaccattggaatacgtatactctgagtcgtttaattgatggtatgtagaccattgtaaattttcaattgccggaccgtagtcgaaaattggtttcattgttgaaccaacttggcgttttaaatcagttgccatattatgacctttgaaagtagacttactttctttacgtccagcaccaattgctcgaacttctccagactgtgtatccataaatacgaatgacccttggaattgatcgtccggatacttaataagattgccatccataattttgtcggcgtaatcttgagcatcttgatcaagtgttgtatgaatcgttaaaccatctgaaccgatatttacatcaggatattctttttcaacttcttttacaactgcatctaaaaatgcttgatacttcatctcagttacttctgaagacggttgaaggccctcagttactggaatcttaacggcgttattcatttcttcttttgttatataaccatgtcgattcattaatgataatacgacattacgacgatttgttgctcgttcaacattttccttttttgttggatcataaatgtttggaccttggggtaaaccagcgagcatagcagcttcatgtaattgcaagtcttttaaatctttaccataatatttttgcgctgctgtcgcaataccgtatgaacggttacctaaattaatcttatttaagtacatttctaaaatctcatgtttagagtattgttgctctaatttgtaagataagtaccattcttgcacttttcttttagcagttttgtccatcgttagaaagtagtttttaacgacttgctgtgtaatcgtactaccaccttgggaaccgaaaccaccagtgacattttccataactgcttttgtagttcgtttaaaatcaattccattatgatcatagaaacgcgaatcctcagttgcaagaaatgcattttcaactacttttggaatttgatcataagtaacatgtgttcgtttttcagcaccgtattcatagaagaaatttccgtttttatcgagaaactttgttgataaaggattaacaagtttggatttgtctaattttggagcgtcctttaccataacaaagaaagcggaaacgccggctacaagaccaacgataccaagaagtagacaacctataaggaatttcttgaaaaaggagccttttttctttggtttttcttctttatgtgtttttttctcttgatttttcacatgatttcgttctgtacgagaacgataattatctgacattatactttctcctacctttcattctctcccccaaaagtcgaaaaaagagccttagtgatgactctatcacgaaaaataaaccatgtctagtacacggatatagtcaatccgagggtgataaccgcatgataataaggatccatgctcttctatttcttctttcgtaatcgacttgcgtccaccagtattttgacgattccaaaatgcaataatatgttttgcatctagtaaataaaattcatcaaaaagtgtaaatttaataataacaaatgcaattccattatgagcaacgacttgcttcatatgttcaatttgatgaaggtggaagttttgaagtgggaaactagttttatttttggtttcctttgcttcaaaatcgatgtatttccctttgtatacaccgttgtaatctgttgtagaaggttgtttaaaatacgcttcttttaccactgcagcacttcgagcggggtaatctacttttacaatttgaagaggtgtaggctttttatgtacacatgcaatattatgggttaagtaatattgatttgtttcattcaattcctcttcaagggacatacctctattactataagtatgtgtttttataggtgttttttgaggttgtgaagcttgattatacctttttccatttgggtaacgaatggtcatagtgtgtccacccccaacttgctaagaattacttacaaaggtgattatatcaaaaaatgaaaaaagatgtgacctttttgatgaaaggtatgatgacttatttatgtttacatggaatgattatatgaaaattaaacaaaatcgagaaaaaaatttttgtgcagaggaagaaaaagcaatcattcacaatattaaaaagaaaacagaaatagctaatgtggacaatatttctcggacacaatcttatcaagaatattatttaagaaatagtgaaatcaggtgggcctttttagcgagtatggtttcgagaaatgcgggctggaatatgactgatttagaagggagatattatgctactgttttacctagaacggtaaaaaaacatttatttcttctgtacgaacaggctaattggattatttttttagatgcatttcctcagctattattgtatgaggaaagtaagaagagacatgcacctctctttcatttgttgcaatacttcaacgtatcaatttttatggaaaaagaatggttacttttctgggaaagaagagatacgaatagacttatgacagcgcttattataaatgaacaaaataaaattcaaaaaccagtcattgagaatacatattttaaaaaacatgtattccatactgcactttttaaagtacaagaaagacttcatattagtgcagttatcttcccaacaattgaagggagaatgtatgggttttcggtttatcaatttgaaacgttacaaaagcgtatagaactaggaaaaaaattagcatggttattgtttcatccaatttataatggttcgttttataagtttgcactgcaaactacacatactgggtctagagaagattatgaagtttacgcaaaggaaactcgaaagtcttatacgccaacacttagagatatttatcctgttattttacatgaagaaataaaaatgagagattggttttgtgcaaatatgaaaatgaatgtgctatttgtacttgaagaacctaaaggggaagttaatataacagaatggtatagaagaaagagagaacaaatctataggctatctatcgtaaaccgttttgctaaaaggatcgatgagttcatgatataataaaaaagaagtcccgtcttccattttgaagacgggacttcttaatttgaaaaaatcctgctatgcgtgctacaactttaatttcaaaacgtaatgctagtaggagattaaggatgatttgaaatttaaatgttcgtaataaagtctcgctttatgtagcagggaagtttggaccatctagctttggattgccagtctcgggtttattttgttgtttgttttggtttttctttttttcatttttgttctttgccattgtaatacacctcctttttgtattgttaccatttctataaatgacatacgaaatgatttctttgacgaataacaactagttttgtcatgtgggcaggagtggtgaatcatccggcgaaattacatgacaaaggaaaagcaaagaaggaggcgttttgtatatggcgatggttcagaaggaagatgtaatgaaaaaaatggatcaaatgttaagttctctcgatttgctggaaatgaatatagggattagaatgaatcatgcattaaaggatgcgagtgaaaaaatatgtaataagatagaaataacagaaatgcatattgaacatatggaaaataaattagtgcatcacgaagaaaaagggaattgggtgaagacatttcaaaacgtcgtagtgagtgcataataaggtgggaaagaaatgaagaatgaagcattaatacagtcttcagaaaaactcatgcagtatagtaatgaagcgaatgtaaaaaaaagagaactaactgaatacgatttttataaggatatgaaaccgtttgtagatatggtagatgaggaattaaagaagtggaaagaattagcttatacgtggattaaagaagaaaagccaaagtatatacatgtacagcaaattgatcaagtatacgataatttacaaacgaatgtgttgcaatgctttgtaaataaaggtaaaggtaaacgattctttgaaacacaccaagccatttcgtatactttgcaaaatatagttgagcaatgtaaataacaagagggagagccctcttgttatttttatgcttctgtcattgttgtaggttttgttgcgccgtttatttctaattcttttattaatgttcgataatctgatatgcatatttttccttcgagataccaatgtctcgcaaagtctaataattcatttgcattctctgtgcaatacccctttttttgagaaaacgcttgttttaaatcccctaataccatgttgattcctcccccatgagaatcttcttcttaattatcatagcatggaagggttttcttttttaattttttaaaaatttaaacttccgacaaaaatagacatatattccatcacacatattattttataggtacatattatatatgtagaaacttatgtgaaggaggagagaatgcatgtttcaacaacctaacgtatatcagcaaacgaatccatatgcacagcaaaatatgtaccaatataatacggatacatatttacggtataatatgtatcctttcgagccttattatggaaatcaaaattattatcaaccgtttgaagtgtcctttatgaatcaagctcaacaaccacaacagcagcaaccttatgtgaatcaagctcagcaaccatacatgaatcaaccacagcagcagccttatatgaattcgcaatattatatgccaccaccatcgccgtatgctaatcaacaagcgatgttttatccaccaaaacaaccgtacccgacgcagggtaagcaaaagcaacaacagccaagccagttttctagttttgtttctcaatttaaaacatcagatggtaactatgatgtaaataaaatgatgaatacagctggacaaatgatgaatgcgatgaatcaagtgacaggtattgtaaagcaagttggaggcttttttggtaagtgatgttgaaggattgtctataaaaacaatgtaaatgaaataaaggactagacaaatttccttgtaataaatgggtatatataacaaacggctttctctcttttctcatactgtaaagtgtaatcagatttttttaacgagagaggagagaaaaaactatgcatcattgtcatccttgctttggagggcataagcctacaggacctatttgtacgactgctcctgtcattcatccgacgaaacaatgcgtaacacactctttttcaacaacggtggtgccacacattttcccaacacatacaacacatgtacatcatcaacaaattaaaaaccaaaacttcttcccgcaaacaaattcaaatgtaaatgttgtggacccaatcgacccaggattcggcggcggatgtggaccgtgtggccatggtcatcatggacatcatggacatcacgtatcaccatttggtccaggaccaaatgtatctccgtttggaccaaacgtatcaccattcggaccgaatattggaccaaacgtatcaccattcggtccaaatatcggaccaaacgttggtggaatgtttaaaaagtaaatgatatgttagaactagcgaaatgctagttctttttttgtaattggagtgttgatatgaaagttattgcagtaacaggatataagccatttgaacttggaatatttaaaaatgatcatccaggggtggagtgtataaagaaagcgttacaccgtaaattaaccaattttgtagaagatggtttagagtgggttataataagtggccaattaggtgtagaattatgggctgctgaagttgtttttgaaatgcaagtagaatatccagatttaaaattagcggtattcactccgtttttagaacaagaagaaaattggaaagaagataatcgtgaatattatgaatttatcctttctcaagcagaccatgttgatagtatcacgaaacggaagtatgaaagtccagagcaatttaaattaaaaaatcaattttttattgaaaaaagtgatgcgcttttagcggtatacgatgaagaaaaaccaggaagtcccaaatatattgtagaagcagcaaagaaaaaaggagaaatagaaaattatcacagttatttcattcttttttctgatttacaagatataatagaagaggaacagtggaataatgcagagtaaatatgtaatatagtactcgtatatatgattgacaaaaagcattgtttctgaaaaaatttagttaatgaaagttttggtaaaaatttgaggtgaagaaaatgatttcggataaaattaaattaacagcgaaagatattttagaaaaagaatttaaaacaggtatgagaggttatcagcaagaagaagtagacaagtttcttgatatgatcattaaagactatgaagctttccacaaagagtttgagcaattaaagcaacaaaatgctcgtttaaagcgtgaattagaggaacaaaaactagcagtaacgcaagttccacaacaacctgtacaaacaccagttgcacaaccagtttataacaacacgaatacggatattttaaaacgcttatctaacttagaaaaagctgtatttggaagtaagttatacgaatgatgtaaggtgggaaaaggtttaagcattttacatagaaaaaaacgttgcaaaatctttttgtttccactatactaatggatgtcataacgtttgggtaatcgctgcaacgccaacgttgtagaggaaagtccatgctcgcacggcctgagatggctgtagtgttcgtgcctagccaattcataagctagggtattctggctgtaaggctggtttaacggcagggaaaaaacctaagtcctttcggatatggtttgactacctttaaagtgccacagtgacgaagtccttgaagaaatgataggagtggaacgaggtaaaccccacgagcgagaaacccaaataatggtaggggaatcttttccaaggaaatgaacgacgggaaaggacaggttttataacctgtagatagatgattgccaccggagtacgaggcgtgggccgtttgtagtacaaaggaacagaacatggcttacagaacgttatgaaccaactatgaaataactcagctctcctttgttagaggagggctttttatttgtatgaagttataaagtatgagttaaaatggttaatgagaaaaattttcgtaaaatgtaatgattaataggaccaattgctattaattattgtttgaatatacataagaggtgaatgcaaatgggaaaagttactttaattgcaacagcggcaatgggtattgaagcgttagttgcccgagaagttcgcgatcttggttatgaatgtcaagtagaaaacagcaaagtaacatttgaagcagatgaaaaggcgatttgtcgcacgaatttatggttacgtactgcggaccgtgtaaaaattaaagttggcgaatttaaagcaacaacatttgatgagctatttgaaaaaacgaaagcattaaactggggagattatattccagagaatggcgaattccctgttattggtaaatctttaaaatctgaattattcagtgtttcggattgccaacgtatcgttaaaaaagctgtcgttgaaaaattaaaaacaacatataaacgtacaacttggtttgaagaagatggtccgttattccgtatcgagattgcaatgctaaaggatattgcaacattaacaattgatgcgagcggtgttggacttcataaacgtggataccgtatggatcaaggggaagctccgttaaaagaaacattagctgcgtctttaattaaattaacaaactggaagccagatcgtccatttgttgatccattctgtggatcaggtacaattccgattgaagcagcattaattggacaaaacattgcaccaggatttaaccgtggtttcgcatctgacgagtggggctgggtaggtaaacaaaactggcgtgaagctcgtcaagaagctgaagatttagcgaactatgatcaacaattacaaatcattggatccgatattgatcatcgtatgattcgagttgctcaagataacgcagaagaagtaggcttgggcgatttaattacatttaaacaaatgcaagtaaaagatttcacaacaaaagaggattatggctacgttgtaacgaatcctccatacggagaacgtttaagtgaaaaagcactcgttgaacaactgtacaaagaaatgggacaagtattccgcccattagatacatggtcagcgtatgtattaacaagctacgaagcatttgagaagtgttacggaaaagatgcgtcgaagaaacgtaaactgtttaacggatttatccgtacagattactatcagtacttcggaaaacgtccaccgcgtaattcatagtataaaactcctccagcgcgcatatactggctattatgtaatgcgtaaaggaggaagtgatatggataatttccaattatcaatgattcaaaaagctattcaccgtacgtatgatgagctcggaaaagaagtggatagtcaagatgcgattgtagatgaaatacaaaaagcacaagaagaatatttgtcagctctttcacatgaaacagcgattgataaaaggtatttaaagtcattaatatagaagaaaattttcctttttcgaaaggaaaattttttttcgtgtatttatatgtatggcaacaggagaaagtagctgcacacatataagtagcggttactatatctttttatagaaaaactttttggttggaggctaaggatgtttactgagaagagattaccatttgaagtaggaaaacaagacaatttttatgataagttgaatgagtggattggagatgtgttttacgacatccttccggaaaaaggttttgaagagcgtgatgaacaaatttttatggcgtttcaattagagcgtgctttccaagaaaagaaagttatgttcgcagaagcgggtgtaggaacagggaaaactattgtatatcttctatatgcaatttgctatgcgcgttatactggaaaaccagctataattgcttgtgcagatgaaacgttaattgagcagcttgtgaaagaagaaggagacattgcgaaattatctgaagcgttaggcttatctgtagatgtaagacttgcgaaatcaatggataattatttatgtttacgtaagcttgaagatgttatgagtggacgagctccagaagtaattgaagacgtatattatgaattaccacaattcgtatttgatcatggtacgatgcaaaactttactcactatggtgaccgaaaagaatttccactattaaatgacgaagaatggtcaaaagtaaattgggattacttccaagattgcttcacttgtgattctcgtcatcgttgcggtcaaactctttcacgtgaacattatcgtaaagcagcagatttaattatttgttctcaagatttttatatggatcatatttggacgtacgatgctcgaaagcgtgaaggacaaattccattattaccagaaagtagttgtgttgtattcgatgaaggacatcttgtagaatatgcagctcaaaaagctttaacatatcgtttaaagcaaacgatgatggagcaacttttaacgagattattacaaaacgatattcgtgaagagtttgcacatttagtagaagaaacaatttggcaaacagagcgattctttgatgtgttacaagaaaacaaaaaagaaattgccggttctgatcgtttagaaattactgtgacagaaaaagtaacagctgaagcaaaacgactttatgcgaaaattggtgaagtcggtgatgcgttagtatttgaaagtgaaatgcatacagtaaatacgtatgatttaaatatcgttgatgaacatttagatgtattagaacattcacttcgtctattcatgcatgagaaaaatgtaattacatggggtgaagaaggtgatggagccttcacgttagtaattatgccacgtgcagttgaagaagtattacaagagaaagtattctcgaagaaaatcccgtatatcttctcatctgctacattatctaataacgattcattcgcatttacagcaaatagcctaggggtaaaagattacttatcattctcagttgcctcaccatttgattatgaagagcaaatggcagtaaacttactatcgcatacgaaagaaaatgagtgggaaagaaagtgtcaatatacacttgaaaatatacagaaaacaaacggacgtacacttgtattattccgtacaacgcaagaacttgcagcgtttaaagaatatgtaagtaaagaacaaatgtcagttccgttcttatatgaaggggatcaagaaattagtcagctcgtttctcgtttccaaaatgaagaagagactgtactttgtgccgttcatttatgggaaggtttagatattcctggttcatcattatcacatgttatcatttggtcattaccattccctccaaacgatcctgtgtttgaggcgaagcgtaaacatgtaaatgatccattctgggatgtagatgtaccgtatatgattttacgtcttcgtcaagggattggccgtttaattcgtacgagcgacgataaaggtgctatatcaatcttcttatctgatacagaagatgagaaagtggtagaagcggtgaaaaacgtactaccggtagaaggtaaagaattataaggagaaagcttggcgcttgccaagctttttttctattataaaaggaatttagatttccgtgtcgaattaagtttgaggtagaaaagggaggtttttatacgatgacagtagctacatatgaagtagaaaaacaatttttaacatatgtgaagaagatacaaaattacggagaagcattaagtttaatgttttgggacttaagaacaggggcgcctaaaaaaggtgttgatcaacgttcagaagtaattggtatgctttcatccgaagtgtttgctatgtcgacttcagatgagatggggaactatttaacagagcttgaagctttaatacgtgaagataaactttctgaaacgacgaagaaaatggttgaagagtgtcggaaagaatatgatagaaataagaaaattccacaagcggaatacgaagcgtatgtgaaattagaagcgaaagcagagagtgtgtgggaagaagctcgcgaaaaatctgatttcgaaatgttccgcccgtacttagaaaaaattgttgaatttaaaaagaaatttattacatattggggttacgaaacatataaatacaatacattattagacatgtatgagccaggtattacagtagaagttttagatcacgtatttggtcaacttcgtgagcgcatcgtgccgcttgtaaaagaaatctctgagtctaaaaaaggattaaaaacaagtgctttatcggaaaatttttcaaaagaaaaacaaaagaactttacattagaactattaaagcaattgaattatgactttgaagcaggccgtcttgatgaaacagtacatccattcgagattacattaaatagaggggatgttcgtattacgacacgctatgacgaaaaggatttccgcatggctgtgtttggaacaattcatgaatgtggtcatgctgtatatgaacaaaatatttcagagaaatttgaaggtacaccgttatgtagtggaacatctatgggtattcatgagtcacaatcgttattctttgagaactttatcggccgtaataaatcattctggaagaaaaattatgatttattaaaagagtatagcaatggtcaatttgatgatatgtcagtcgatgaattttatgatgcaattaacgaatcgaagccgtcattcattcgtatagaagcagatgagcttacatacccgcttcatgttatggtgcgttatgaattagagaaagaattatttgatggtacattacaagtgaaggacttaccagcagcttggaatgataagatggaagcatatttaggaattcgtccggaaaatgatgcgcaaggtgtattgcaagatgttcactgggctggtggctcatttggatacttcccatcttatgcgcttggttacatgtatgcagcgcaatttaagcaaagaatgttaaaagacattccgaactttgatgcattattagaagaaggaaacgtaacaccaattcgtgaatggttaacagaacatattcaccaatatggtaaaacgaaaaagccacttgaaattttagaagatgtaacaggcgaagggttaaatgcaaattacttagcagattatttagaagtgaagtataaagaaatttatgagttataaaaaagagctgcttacttgcagcttttttttatagggggatagaagatggtttatacatatacagtaatgacgcaagaagaggcggaagagattgcatataactggcattataaaggggaatattccttttacgatatagaggcagatgaagaagatttagctgagtttttagagggtgagagtagagggaatcatgtattttctgtgaaagaaaatggtactctcattgggttctttacggtttgtaaaataaataatggaacggttgatataggacttggaatgagacctgatataactggcaatggatttggtttacagttcgtgaatgctggactagcttttagcaaagaaaaatacggatgcaaatatataacactatcagtagcgacatttaatgagagagcgataaaagtgtataaaagggcgggatttgaagcggttggaacgtttatacagaaaacaaatggtggttgttttgagttcttgaaaatgaactatatatgtaaacgtgattaaaaaaacagagggatcttctgtttttttattttgatttagaaatatatgatacatattttttactttttgtaattgagagttttgaaattttggtagagggtgtgtatgatagaagtttagtagcaaatagtaggtttagcaaggaagggtagaggtagtatgattacaattaaaacgaaaaatgaaatagatttgatgcatgaatctggaaaattacttgcttcatgtcataaagaaattgcgaaaatgataaagccaggtataacgacacaagagattgatacgtttgttgaaatgtatttaaaaaagcatggtgccacatctgaacagaaaggttacaacgggtatccatatgcgatatgtgcatctgtaaacgatgaaatgtgtcatgcgtttccggccgatgttcctttaactgagggtaatattgtaacaattgacacggtagtaaacttaaatgggggtctttcagattctgcttggacgtatagagttggaaaagtttctgatgaagcagaaaagttgttgttagtagctgagaatgctttgtataaagggattgatcaggcggtaattggtaatcatgtaggagacattggctatgcaattgaaagttatgtaacaaatgaaggtttttctgtcgcaagagactttacgggacatgggattggtaaagagattcatgaagaaccagcaatttttcattttgggaaacaaggacaaggacctcagttacaagaaggaatggtaattacaattgaaccgattgtaaatataggtatgcgatattctaaagtagatttaaatgggtggactgtacgaacgatggacgggaaattatcagctcaatatgagcatacaattgcgattacaaaagatgggccaatcattttaacgaagttgtaattgggaatgaaagagtttgcaaaactcgaacgaaaatagtggtttttaaaaatttgtacgtgtttttttgataaatgcttttcaaagcataaaaagtacgttataatccttctataaaataaatagttagctacactcatataatcgcggggatatggcctgcaagtttctaccgaagtaccgtaaatactttgactatgagtgaggacgaatataattgcttgtttagcattctttttttgcgaaactccaaaagcgcgtctctcacttgtaacgagtggtggcggcttttggagtttttttattgcataagagggggaacaaacatgaaagtattacaagaaaagattttgaacgaaggaaaggttttatctggtgacgtattaaaggtagatgcttttttaaatcatcaaattgatccagtacttatgcaagaaatcggaaaagaatttgctaaacgttttaaagaagagaacattacaaaaatcgtgacgattgaatcttcaggcattgcaccagcagttatggctgcattagagcttggtgtaaaagtaatttttgcacgaaaacgtaaatcgttaacgttacaagataatatgtacgttgcaaacgtatattcatttacaaaacaagaaacaaatgaaatttcattatctcgaaatcatatcgatgaaaatgatcgtgtattaatcatcgatgactttttagcaaatggtcaggctgctttaggtttaatgagtttagtagagcaagccggagcgagtattgcaggaattggaattgttattgaaaaagcatttcaagatggaggaaagaagcttcgtgaacaaggcgttcgtgttgaatcactagcagaaattgcatcacttgataacggcacagttacatttgtacagcaagaaactgcggaggtgaaataaacgatgaagcagcatccatttaaaattgcatcgcttggtatgcagcatatgcttgcaatgtatgctggagcaattatcgttccgcttattgtgggcggtggacttggtttgaatcaaaaagagttaacatatttagtctcaattgatttattaatgtgcggcgttgcgacaattttacaagcattatcaaatcgctttttcggtattgggcttccagttgtgcttggttgtacatttacagcggttggaccaatgattgcaatcgggaaacaatacggcgtgtcttctatttatggagcaattattgctgccgggttattcgttgttatttttgcgaaattatttggaaagcttgtaaaactgtttccccctgttgtaacaggatctgtcgttacagtaattggagttacacttgttccagctgctattaatgatatggctggcggagtaggaagcaaagatttcggaagtcttgaaaacttagcgttagcatttggtgtgttactatttatcatcattatgtatcgtttcttcgacggatttattcgttcaatctctattttgctaggtttattgttcggtacaatcgttgcagcatttatggggaaagtaagcttgcaagcagttggagaagcagattggttccatggtattcagccattttacttcggtacaccaacatttgaattgacgccaattattacgatgattttagttgcttgcgtagggattgtagaagcaacgggtgtatattttgcattatctgatatttgcaataaaaaaatcggtgaaaaagaattaacaaaaggctatcgcgcagaaggattagcgatggtgttaggtggcattttcaacgcgttcccatatacaacatactctcaaaacgtaggacttgttcaattaactggagtaagaaatcgcgttattatttatacttgcggtggtatgttaatcgtacttggtttcattcctaaaatcgcagctattacaacaattatcccaaaatcagtactgggcggtgcgatgttagcgatgttcggtatggttatggcatatggtattaaaatgttaagtagcgttgattttggtaaacaagaaaacttattaatcgttgcatgttctgtcggaattgggcttggcgtaacagtcgttcctacattattttcacaacttccagaaagcattcgtattttaacagataacggaattgtacttggaagtgcgtcagcagtacttttaaatatcgtatttaatatggtgccgcagcgcaaagtgaaagtagaagaagagccagtatctatgcaaagtgcagtaagagaagcgtgaaaaagcaaggtctcgttatgagaccttgcttttctttttaagtggcattattttcccgtacgtaccaagacgccaaatgtactcaagtggcccgtattggtaatgtgaaagccaccagcggctaataaagatttgtaacgtgtagaaactaatgcagaatattggtccaacccataatggagcaggataataatttttaaggaatagaccaaatacaagtaatgtaacaattgtatgcgagatgtaatttgttaatgccattcgtccaacgtattggaatggacgtaataatgtttgccatttttctttttgtaataaacgcattagcgtgaaaatgtagaatatgaataacgtttttccgctaaacattgtaaagacctgcatataaattggttcataaaatggttttgataagaagtaacggaccatgaagaaccacattggtaatgttaaaaggaacataataatttgccattttttaagttttggatctaactctttcgtgcggcggaaaatatcctttttgccggcgtataaaccaagcaaaaatagcccaactgtttctggaagcataagtaaatttaatccaattccatcagcgtaaaatgcatggaaacgattttgtatttgtgacagccagtcttctaatggcatgataggtaaggaaaaacctagctcttcctttggtaccaatgcaaccgtaataccagccattagcataatgaattgaaaaatactcaataaaacgatagcccatattaaaatagtacgaggttctctcttataaaataaaaataagaaaaatccagcaatcgcataagtatgtaaaatgtcaccgtcccataaaagaacgtaatgtaagaaaccgaataataataaaataagtaagcggcgaacaaacaaagtttttgggcggtcggttttcgcctcagcacgactcataaaaatataaaaacctaatccgaataaaaacgaaaaaattgtataaaatttcgtttgaataaacatatcgtaaaataggcgaatatagctgtctatcccttcgtaaattcctgaaagatcacgtgagtcaaccccggcgataacaggccaattcacaagaaaaatacctagtacagctattcctctaataatatcgatggagtgtatcctctcgccatgtgtgagattttgcgtcatttttttcctccttgttaagtaattcccttttattatacaaaatgtaagatggaggggataggcgatatttccatttttttaaactgttaagttatgtaggataagatataataagagtgcacaataagttttaccctttttcaaaacaggcagtaaagctccttcttataaggagctttctttatgaaaagtgttgataatgattctctttaatgataaaatatatttaaaattgataatcattatcaaaaaaggttggtgcgtaagtatggtatatacattagtagcaggtacagtcgctgtatatgcagttattgcgaagtatgttttaaatggagtaggaacagcaaaatgagtgatatgacataaaatccctttcatttgtaaaaagaatgaaagggattttttatttttaatgagaatatgctgaaaatttagtatgatagtaaagtgaaactgtaatcaatgggtaggtgtaactctcactggttatgagctcgcaattagcgggaaaaagtatatacatcttggataaaggggaacaagggaatgacaaacatagtacagacaaacggtatgaaaaaacttgtttgtttttatgaagagtggcaaaaacacggcgatgcagagaatagtttaaagttgtttgaggtgattcaaaaatataaacaagaacagcttatgatagcgttctgtggtcacttctctgcggggaaatcaacgatgatgaatcatctatataaagcgcagctgttaccaacaagtccaattccgacaagcgctaacgttgtcaaaattgaaaaaggaatggatcgtgttgttgtaacggttaaatctggagaacagtacgagtatgacggtgcatattcagctgaagaattaaaacaaatttgtaaagatggtgatgaggtaattggtgttcacatttatcggaatgatgcgccaattcctgaaggtgttatgttagtagatacaccagggattgactcaacagatgatgcccatcaattagcgacagaatcaacgctacatctagcagacgtaattttttatatgatggattataatcacgtccaatcggaagtgaatttgcaatttgttaaagaattgaaacaacgtaataaaacggtttatctcgttgtcaatcaaatagataaacataaagaaaatgaattgtcgtttgagaattataaagatagtgtaaagcaatcgttctctaactgggatattgaagtagatgaagtatattatacgtcattacgaatgatgaaccatccacataatgaaattggaagcttagaaacgttaattacatctatcatgaaagaaaaagagcggtatgtaagagagggaatggagagagaaacagaatatttaatgggggaacatttctcgtttattctttctgaaaatgaaaaagctcttttgaaatatgagaaagagttagcatcaccgctttctatttcagagatagttgaaaagaaagcggagctaatggaaacgaaacgtcgcgaggctagtaaagagtctcatgtgagaaatgaatttataaaaggcctacaagctatattagataacgcgtatttaatgccatttgaaatgagagaattggcaaatgcgtacttagaaacgaaattaacaaagtttaaagtcggtttgctatttgcgaaaggaaagacggagcaagaaaaacaaaggcgtgtagaggcgttttattctgcccttcaaaagactgttgaaacgcagcttgattttcatgtgaaggaatttattgtagccttcttaaaagaagaaggattgttcacggaggaaattgggaaagacatatatgggttagaaattgctttcggaccagaaatgttggctgaggtaattaaacaaggcgcaggtttcacaggtgattacttacttctttatacagcggatgtagcgaatgaactaaagaagcgttattttataaaagcacagcaaatttttgataaaagtgcggtcgttttaaagcaaaaggtgagggaagcagttgctcgtattgaagaagagattgaaacatatacgatgttgcaaacggcgaaagaaacacaattacaatacaataacaatttggtggcatatgaagactatttacgaaatgtttggcacgatcatgttgctacgcctgaaggtttgcaaatagatgagatattgcaaagggaaaagcaaattgttagtgagaaatttacactacaagagcaggaaatcgtaaacgataacgtagcgattcatgaagaagagctgaaaggaacggcggctttaaatattcagcggatattagagaaagtgaaaaaagctgaaacgatattagagccattgccagcgctgaaacatgtacagcaagaggtaatagagaaaagaagacgtgtagaaacaaaacaatttacagtagcgttattcggggcatttagtgctggaaaatcatcatttgccaatgccttactcggtgagaaagtacttcctgtatcaccaaacccgacgacggcaacgattaatcaaattttgccggttacagaggaaaaaccacatggaacagtaattgttcagtttaaatcaaagcaagcgttattagaagatatgaaagctgtttataagctgtttcattatgagattgctacgttagatgaagcgttagcacaaattgataacgttatgaaatatccttcaccaactgggaagcaaaaaacaacatttagctttttacgagcggtacaaaaagggtatgatgcagtttctacttatttaggagaacaagtacaagttacattagaagagttctctgattatgtagcgaatgaagagaaatcatgcttcgttgagtatatggaactttattatgattgtgctttaacaaggcagggagtagcgcttgtagacacacctggagcggattctatcaatgctcgccatacggatgttgcattccagtatattaaaaacgcagatgctattttatttgtaacatattataaccatgtattctctcgtgctgaccgtgaatttttaattcagcttggtcgtgtaaaggatacttttgcccttgataaaatgttcttcttaattaatgcggcggatttagcagagtctgaagaagaacttgaaatggtaaaaggttatatcgcagatcagctactacaatacggtattagaaatccgcgtttatttgcaatttcaagtttatgtgcgcttgaagagaaacaaggaaagaatgttgaaaaagagaagtatggtattttacaaaactctgggattactaagtttgaggaatcatttacgtcctttatgatgagagatttaatgcttgtttctgtgcatgctctatatggtgcgttgcaaggggcagatcagcttttagtaaacatgataaagggtgcaaagcaggggaatgaagagaaagagaagcaaacgaaaaaatatgaagcagagcgtgatcaactacttcatatcatttcttcatatagtgtacttgctgaagaacaggcgatgcaaaatgaagtgaaagagttgctttattacgtgcaacagcgtctattcctccgctataatgatgtgtttactgaatttattaatccggcatcacttcgaacggatggaaatgtgaaaacacaattgcaacagtgtgttatggaattagtagcatttattcagcatgatttattacaagaaatgcgtgcgacatcattacgccttgaaaaatggatagacgaagcgatgaagcgtgcaaaggatgaaattgtagtgaactgtaaagtagaaaatgaatcaatttctatgaatggaacagtggagtatgaatacaaagatattacacataaagaaccgttcccttcagttgaaataaaagatttcaaaaaagcactggcacattttaaaaatgagaaaagcttttttgaaaagaatgacaaggcttttatgcaagaagacgctaaatctgtattagaaccgctcgtatcaaactatgtagctgatgaaaaacatttatttgttcatcattataagcaagagtgggatatgaagtggaatttattcgaaaaagtgatgcagcaagatgtgatgaactattatgaaagtatattgtttgcattggctgaaacgatcgatgtatctctatatgaacaaagtaaagaacaattgcaaaagcagttagtagagattgaaaaagaaatttatgttatatagtcgttatgagaaaaagattcgttcaattttcttttgaagtacagtatctaaagattttacaaatccagcaaattcatcggtagaaatcatatgagtaagaacgagtcgtctgccatctggtgtttcaccgcataagacgaatgaagaaaattcatatgttttgttttcaactactaattttggataggaatacgtgtcgcttttcttcttctttccatcaatagagatgacgttgcattttttctcattgttgtccatggtgaatccctcctttctattatttatggtagacaaggagggtttagaacaatagagaagggggaattttttatgtctgttgtaatagaacgtattccaaaagaggctataccgaaggctttattgttacttgctgatccaagtgaacggcaaatagctacgtatgtacaaagaggattaacatacgtagctaagcagggggggagcgttatcggtgtatatgttcttttggaaacaaggccaaagacgatggaaatcatgaatattgcggttgcagagcatttgcaaggaaaagggattgggaagaagctattaaggcatgctgtagaaactgctaaaggatatggtatgtcaaaacttgaagttggtacaggcaattctagtgtttcacaacttgctttatatcaaaaatgtggatttcgtattttttctattgattttgattacttttcgaagcattatgaagaagagattattgaaaatgggattgtatgtcgtgatatgatccggcttgcaatggaattgaataaaaacgtataactatttagggggaagagaagatggaagtacataaagcaattacagcacattctcgtaaacaaaatgaaagtgtaaaagcatgtttacaattagatgcacagcgtgaagcagctattgaagctgccgtatctcttgcgtcaaatgggaaagaattttcggttgatgtcattaatgttgtaacgaagcagattaatgatcttgcaaaaaatggtgttaccttgcagcgtaaatatgttacagaagaaatggttatggaatatgtaagtcgtttgaaagagaaagaaggtcgttaaagatgatagttacagtcgaatggttacgtgagcatatagaagatgagaatgtccgtataatcgattgtcgttttgatttagcgaatcctaattggggtagagaaaagtatgaagaaggacatattcctcatgcgttatattttgatttgaatttagatttatcaagtcctatagcagaacatggtggccgccatcctttaccaaatattgaggagtttgcagacaagctttcgaaggctggtattgatgaacatacgacagtaattgcgtatgacagtcaagccggtgcaaatgctgctcgtttatggtggttatgtaactatgtaggacatgagaaagtatatatattagatggtggtttccaggcttggaaagagaatggactaccgacaacagcggaaattcctgttgctatacgaaaaacattcaaagctaatatacaagatcatatgcttgtaacgatggaaacggtcagagagaatatccgtgcaggtgcggatgttacattaattgattcaagagagcccaaacgttatgctggtgtagaggaacttgtcgatcataaagcaggacatattccaacagcggtaaaccatttttggaaggatggaatgttgcaatcaggacaatttaagaataaagctgggcaacaagaacgattccaaaatctgtcgaaagataaggaaaccattgtatattgtggttctggtgttacggcatgtccaaatatcgtcgcattaaaattggctggattccaaaatgttaaattgtatgcaggtagctggagtgattggatctcttatccagaaaatcaaattgcaaaagaagaagattaatcacttgcatgcaaaaataatttgtattaaaataaggtcacaagcaagagattgctcgaaaaactttgtattttacacattggaaacaatgtgataatataacgacaagtaaataatacatcctgcggtgtgcgtaacttatttatgtctaaaaccgatgttagttatacggaagctcaatatttagcgaccatcatcaagccttccttgtggaggaagatgtacggtaactgtgagggcatccacctgcgagtagcgggtttttggacatttacgaggagcggcacgtgcgggggtcttatttcaactaaccttatataaaattcctacggtgtacgtagcttatgcatgtcttaaaccaataagtttaatatggaagttcaatatttaaatgtagctaacatgccatctttttaagaaggaagttacaaacatttgtgagggcatccacctgtgagagcaggtttatggacatctagagagaacggcatatgtggggctatataaaaaccttacgttttatacgtaaggtttttttgttgcatagatatattaatattatcttgattcacctgtgaagtttccgtaataaatgtagcactttctgtcttcatcagtctctcttgaatccaaggagaattccatagaaatgccgtctcgctgaatatatataatatctgaatgaagagatggtaaaatttcttcgtagttccatacatcttgactatctactaagcttgaacttgtttcacttagttctctaatttcaaaaccgatgtgggagtatgtagggtctgaagggtcattggcgaaaacttctttttgaatataaataactgctgttccgtctgggtcaaccgaagttgcagtaacaacataagtatttttctctttaataaaatattcacaagtcatgcgtgcgataatttcagaattagaaatattggcgtagttccataaagcaggataccctttcgtttcatcattaagtcgatattctaagcgcattttatacctcttcttcctttttcttctactttatcatgccatcctatataataggaatagaatttaaaaaggggagtgcgaaggtgacaaaaacgaaatggctagtaggtggtgtcgtaacgtctttaatgactggcactttatttggttgcgcacaagatcttcccccaaaaccgaatgataatagttgttctgattgggattgggatgatgaacttggggtatggcagtgtgatgatagtagttcaggttatcgtgggcattatttctatggtgggcgatactatcaaaataaatccacttttaaaaattcatcggcgtttaaatcgtatcaatcgtctactgaatttaaaggtggaattggaagcggttcaaagggaggatttgggggctaaaatatgtcgcaatacataagggatcgaaaagaattttatttaaaatatccgaatttttggtcggatttatatgaatgtgagtatagtttgtttcatgttttttctataacaaatcagactttggaccaattacacttagcgactgaacgaatgggcaaaatattttttaagactgctagactgctgcgtaatctaagtgacgaacagcttctagatcttggctttccatccccgagtttatcattcattagaatgaaagggctttatcctgaatctgtaatttcgcgatttgattttgctgtaacagaggataacaaaatcaaaatgcttgagtttaatagtgatacaccaacttttattgtggaatgttttcaaatgaatgggaaagtatgtgaaaatctaggctatgatgatccaaactcggatcaagaacgattgctatcttctggtctaacgaaagcagtaatggaagcgacaaagggattagataatccaaatgttgtttttacagcacatcatgaacatatcgaggattggaataccactatgtatttaagtcagctatgccatgttgaaaataaagtagtgccaatgtcagaacttagaattacaaaagatgctctagttgataaagatggggcgaagattgatgttttatatcgccaaacatatccgatagaagatttaattgaggatcaagatcctgaaacaggagatttggtaggtgtggaactgctgcaacttgtaaaagccggaaagctttttataataaatcctttgtcagcatttttacttcagccaaaatcaattcagtgtcttatttgggggttagcagaagaagaggtcttttatacaaacgaggaacaacagtggattaaagaatatatgttacctacatatttagaaccagatttatttttaggaaaaggttctttcgttcaaaaaccttcatttggtagagaaggagatacaattacgattcgcgataaggatgaaaatattatgcttcaaaatgcacatcaaacgtataaaactgcactgccgatatttcaaaagtatacagaactgccagtcgtatccttggaaacagaaaaagggatggagaaactgtcctatgtgtttggttcttttttaattgctggaaaagcgagtagtatcggtattcgcgcgggagaaaagattacaggaaatgaatcgtactatttaccggtaggtataaaaaggagggggaaaaatgattaattttttattatatttagcagtaacacttggacttttatgtattggtctgttcttgatggaagtgacaacgaaagttaaggaatttaagttaatggctcaaggtaataaggcggtaagctatgtgcttggagggcgattacttgggttagctatcgttttatattcgacagcagctaattcaatttcacttcttgatatgatttcgtggggagcagttgggattttggctcaaattatcgtcttttatttagctgagtggcttacaccacgctttaatataaacaaaagtctcgaagaagataatcaagcagtcggtctttttcttatgtttttatcgctttcaattgggattgtaatcgctggttgtataacttattaaaaactttacgtttaaacgtaaagttttttattttatcccgctatttgccgggcagcccgattggtgagggctaataatcagtggcggatgaacaaaacccccactgattaaagtttcactttatatacgttagtttgccataccatttgaaaaaattgtaggctacggttgacatctattttaaataagagtaacattttcaatgtaatgaaaataagtctctgttaggtgaggctcctgtatagagaaatgctactgcccaaaaatgtcgagagacgccaatgggtcaacaggaatgatcgaattaaggtttttcttaacgtagctggtaatgtacctatgctatacagtgctaaaactcggtgagggagaggtccgtagatttctaattatattagaaatcgtttatttgtgtatgtaatggccgctactctcttaagggtaggggtcttttttgttaccaagctatgagtaatttcatattataaactataaaattaaacgaggaggtgaggagcatgtcaaattctgactcggttccgttacccatatacttcaaatcaaaaatatatgatgtaggcaggaaacgatttgttcctccctctatatttatcacaatatagcgtttataaagcgcgagacactttcacagtaaagtggataaattgagaaacaaagcgtttcttcctatgttgtaaaggaggagacgataatatgttatatgcaaacaaaactgtgggtaacacgtcatataaactaagtaaaaaatcaataaaagaacaaacaatgctccaaaaaaataaagatttattaattgaaattgcaacaagagatgtaaaatctgtatttgcatattttaaaacaacaagagacggactatcaatgaaagaggcacaaaaacgtattcaagtatatggccgaaatgaactaacttcaaaaagagcacttcttgcagaagtaatgatgaagctaggtggcatgattccaggtttttcaaaacaacgtgtgtgtgatgaattacaacgtgaaacgattactgtatctagagtagaatgttctagtagtacagggctaaatagtgaactgaaaatgatggagatacctgtgcaagaacttgtacctggagatatgatttttctttcggctggagatgctgtgccagctgatgtacgtattatttatgcagatgatttattagtgaatgagtctgtgttaacgggaaacgaagcgaatatagagaagtttgagagctgctatcaccttgaacgtaaacggtttattccattaaaacggatgaaagattataatccacttgagcttgaaaatgtatgttttaaaggttcgcatattgttagtggaaatgcaaaagctatcgttgtttctactggaaaaaatacgtattcaggcatcttgcatacttgttgtagtagaacgtcttaatgtgttaatgatgctaaatatacaaaaacaatgtataatagacaaagttgagcaaaaacgtagaatggtaatctatttatataaccttacgtgataacgtaaggttattatttttttaataggagaggaattatgaaaaaagtattattagttgatggtatggcactattatttcgtgctttttacgcaacaagtgtctacggacaatttatgaaacgacaagatggaacccctacgaacgggattcatggttatatgaaacacttattaacagctacgcaagcgatcgaaccaacacatatcgttacatgctgggatatgggaagtacgacatttagaacagaatcgttctcgaattataaagcaaatcgtgcagcgccaccagaagaattaattcctcaatttgatttagtgcaagaaatgactgcaaaattatccattccagttatcggtatgaaaggctacgaagccgatgattgtatcggtacgcttgcaaaacaatattgcaatgaagctgaagtttatattttaacaggtgatacggatttacttcaacttgttgataagagcgttacagtcatgcttctgcgtaaaggaattggaaattacgaatattacacaccggagaaaatcatggaagaaaaaggtgtagagccgtggcaaatcgtccacgcaaaagctttcatgggagatacaagtgataattatccaggggtaaaaggtatcggtgaaaaaacagcgtataagcttattcaagagcacggaacagtatccgctgtactagaaaatgtagaatcattaacaaaagcgcagcgtacgaagattgaaagtgatttagagaacttaaatatttcgttacaattagcccaaattcactgtgaagttccaatttcatgttcactagaagaaggattacacacaatggatgaagaaaaacttagatttgtttgtgaagaaatgaattggggaagacctgaaatattaataaatatgctataaatagtttgggaagagggatgttgcataagtcgaactttgacttggtgacaccttctttttgtttttgtaaacagtattataataaataaaattatgtcgaactcaattttaaatatataaatatttcgacaagatataatgataaaagttgatgaaaataataacttttatcatgaagtgaattaatttcaacatagttttagataatcattttttcgtgttcacaaagttgtcagaaaataaacgagattttcatatgaagttcaaatagaattcacaacaatcaattattataagaacacacagataattctttatcttttatataaaccatcccccaaggaggacaatgaaaatgagaaaaaaagtgagaaaatcttttaaacaattattaattgaaaataaacaatcactattaaataataaagaaaatatgaaagaaattgaagagagaattgagaaacgacatgtagcatatagtggtgccagtaattaaataaaataaaaaagatagcctatgtaggctatcttttttattttatattgaaaaaacgctattcagctctttaattttgtaaatatgcaagatatttttatagcgtttttctatcaatattactcatttttcgaggttgaaattggtatataccaatttttgagattttctattcaaaatattacaaaaaatgttacaatacactcaaatttatactataaaatcattttaatatgaaaaattggaatgaaaagaaaggagaggaatatgaataaagatgtcgctttgaaatgattattatcatttcattaggagttgatgtaaaaagatgaaaagatacgaagaattggactctataagagggatttcttcattagtagtaatgattggtcatcatttaatgattttttcagcatttcaaaattacagttatgaagataataaaccatttgttgtgtatctattaaaagaaacgcctgctcgtctaatttttagtagtggtaacgaatcagttattatcttttttgttttgagcggatttgttttgtatgaatctattcaaaaaaactatagtagctatgggtcataccttttaaaacgtatatgcagaatatatattccttatattgtggcaataattatagctattgtatgccagattacaattagtgaatatggtatttcttatttaagtgaatggtttaatcgctcatggacgattgaaagttcttcaagcttaatcgcacaacatattttattggttgggaaatataatacagatgcatataacggtgtgatttggtcacttgtccatgaaatgcgaatatcaataattttcccgttaattttgatgatttgcttacgaaaaacgttaaggtgttcattactattattgtttagttttagtatatgttctgtcgtaatattatttttgtttcgctcgggcttaacattaacaagctatgcattaacattgcattacacagtactgtttttactaggagcactagttgcgaagtataaaaataatttaatagttttttatagtaattgtactaaaaacacgaaaattgcatggtttttatttgcgattttactttttatgtatgaagggcttataggagaaattaaagtgctcaataattttatatttcgagactacgtagtggcgataagtgcatgtttatttgtcatattaagtttgtcaatatcaactttgtcgtccttgctacataataaatatttgttatatttggggaagatttcttacagtctttatttataccatattatatcgttgttttcccttatatacatgctccatgaaatattaccgttgcctattattttaattttttcacttgttttttcgtttatacttgcaatgctttcgtatgtatatgtagaaaaatttgcattcggagtcggaaagtatgtaacaaaacaagtggatagaagagagaaagggttatctgtaaagagtgaattgcaggatgttattcagaaaagggcggtgaaataattgaagcaagaaatgagtataaaagattttcaacaattactgaaaagaagattcgtaacgattattttaacgatgtgttgtttaaccgcttctttagttcttatctctatgtatgttttaaagccgtcatatcaatattcaacgcaaattcttgttgggaatttagatgagtttaataaggaaaattcaacaaataaaacacaagaaaataagcaactagtaacatcgtatgttgatattttaaaaagcccattaattatttcaacagtcaaaaaaactttgaaattagagcaatcaagttatgaattagcacaaaaaatctcggttgtgaatacggacaactcacaaattgtaactgttacagtaaaaggttccaatccgaaaatcgtgaaagacattgtaaagacattggcagagcaatcacaaaaaagctttcaacagtacacaaatgtacaaggggtgaaagtattaactgatcctgagttacaggaacaggctgaaaaattgtttccgaaatttcaactgatcattcctatttctttaattgttagtttttttgttgggataggtttagctgtatttcgagattattttgatgaacgtatatacacggaacaggatttagagaaaataacaacagtctctgttattggtcacataaatatggaaccaaatagaaaaaagaaacctacagaggttgataaaaaatcatctatatatcgaggtgaacatgtcgatgtttaggacaaagaagcagctgccattcaatttgcatgatgatctgatgaaagagcagttttatacggtgtatcacgagctgaaaaaatccggaaaacaactgttcacagttagttcaacgaaggacagaggtgttgttgcctcgcttatagtaaatatgggtctagtgtttgcggaaatgaaaaaaaaggtgttacttattgatgtgaatttttctgatcctaaactacatgtattattacaaagtgatcacatgataacagtaaacgatataataagctcttcctcctgcaattatgaatctttttctagtaatttgtctaattacttatattgtattcctgcaaaaaaaacagtacatacagggacgcctttagttgctatggatgaatttgataatgcgattgctaagtggaaagaagattttgattacattttcgtttattcttctgaagtatttgagcttcctgctacgcacattattgcagggaaatgcgatggagtggttttagcagttaaaaagcgaaaagattcactacgtacagtgcaaaaagtaatagcggatataaataggaaagaatgtgaattaataggtataattttatattcttgaatgtgggggtaacgatccatgattcgtgaaacaaatcaagccaagttgtatacgattccggctcaagaaaagcctagcatattgaatcgaagtgtaaaacgcttgtttgatattatattttcaatcatattgttactattaacaataccaattatgttgttcttttgtattatgattaccttagaaacatcaggggctccaatatactttcaagaacgtttaggtataaacgggaagaagtttaatgtatttaaattaaggtcgatggtaaaggatgctgaaatgaacggaccacaatgggcaaaagaacatgatcaaagaattacaaaagttggattgtttataagaaaaacgagaattgatgaattaccacagctcttaaacattttaagaggagatatgtcttttgtaggccctagaccagagagagagtttttttataatgagtttgatgcgtatattccagaatttaaggaacgtttaatagtaaaaccaggattaacaggatgggcacaaataaatggagggtataatcttgatccaaaggaaaagttgaggctggacatggagtatattgaaatgaaaacatttcggacggacatccgtattttatgtaaaaccgttttaattgtattgaacggtaatggtgcaagataaatatatatgtaaacaaacaacatatgtaagtaggttacttgcaaaggagaacttgtatgggtagatctattctaagcaatattatccatctattttatagtacgattttagctaaccttcttcaggccgtcagtttaattgttttagcaaacttttttaacgcacaacattatgggatgtttagtgttgccatagcagtgacgtttgttatgttattttttacagacttaggacttagtaatacgtttcttcgagaaggggcaaaggatggagcagatttagagcagattttatcatcgtatataaaaataaggatgattctacttatttttatttctatcatcggttatattgctattcattatatgtatgcggataaaaatttaatttatatgatgataaacgtaatgtttttcatgttaataggattaacttggcaaaacatagggattgcctattttcaactgacggaacgtatgaagtatatagcgctcataaaagttgtatcagcatcagttgtcattataattacatgtttttgtattttcggagagttaccggtgtatgtaacagctcgcttatatgcttttgggtatatgattggtggtttattcagtatatatatcatgagaagaaagacgaaaatgaatatgaaagtcgtaattcataaagcgttattttggcaattaactccctttattattagcggttttttaataatgagtacgccacaattagcgcctatcttgcttaactatacattgccattaagtatggtaggtgtttttgcagtggcgtaccggatgccggcagctttatatcaagtaccaggggtaattgcaggtgcattttttccggtgctctttaagcattataaccagaataatatagaagagcatacgaaattaaatttacttcaaattaaatcaatggcgattgtaggaatatgtatgacgatcggtttatatcatttagcaccatactttatttctatattttttcatgaagaatggaggaatgcagtagaaccactccaaatattatcatttcttattgtgctacaaagtttaaatattgccattgctgacggtttaacgacgagtggttgtcaaaataagaggactgttgtgcagtgtgtagcattggtgataggtggggttatgctttatagctttagtagtcttggtggagtgataggagcggcatacgctatggttttatttgaaatagtcgctttagtgggatatatagcggtaagtgtagtgaagaaaaaaattgtattccaaattgtaataccgtatacaatttattttggtgtaacctttattggagtgcaatatatattgcatacatatcatttaattgcgcttgttcttaatatactaattgtagtagctgccatattcctatatgattatgagctaaaaaaacttcttctttcttttataagaaaaatacgcaaaaaggattatattacgaaacaggggatatagcctatggaaaataatatgaaagtatcaatgggatggattattcttctaatattatttgtcatgttaagtaaatacaatttatatattggattttcattgaagatatatatgatttttttagtcatatatttttgtttaacaattaaagactttcatattcaaaagttatattttcatgaagttatatttttactgttttatttcatttattgtttaagcggaattctttctatgtatttaaatgctagtattcgtatgatttttggcgtgctactcgttttaggatgctattttataatgagaaatttattggggaatactgaaatagtggtacttgaatcatctattgcttatgtaggaatagtatttaatgttgtaagtctactactctatataatcggtttacaatactttagtttatacggtggagaagagagagaaatttttgctggattattagttgatagaggatatccacggttaattggattgctagatgatcctaacatttttattttctataatacaatattttttatgtactatatgacgaatttgcaaaatatcacaaacatcttagggttaattttatgtgttacgacgagtctattaaccttttcaagagggggaatattagcgcttgtgcttgtcatttttgtatatatatgtatgtctagtttcgctaaaaaaataaaaataattatgagtttagtattgtttagtgtagttatttttagtttatcgaatagtgtaatggggggccaattagatgacatattaaataaacgaatttctgatttttcccatgataatggaagtggtagatttacattatgggaagctgcttttaaatattatttatccaatccatatatcggaattggtgcgtttaacttctcgaattattatgagtatcaatttaatgaaaaattatatgtacacaatacatttttagaaattttgtctgagtcgggtacaattggttttcttctatatagtgcgtttttattcatattaatgtttaagttagcgcagcatactttgtttcgtgaaaaaccataccttctattgactatgattgcatttttatttcagatgatgtcattgtcactcattattaacgaagcgttctttttatttttagcagttgttgtgaagtatatttcaatatatgaaggaaggggaaagatagatggtaaaatgtctatcagcacataataaggcgcctcatgtttctgtaataacaccttcttataatagtagacgatttataggtgagacaattttatctgtacagaatcaatcgtatgaaaactgggaaatgattatcgttgatgactgttcaaccgaccaatctgccgtaaaaattaaagagataatagaaggagactcacgtattaggttattatcattaaaagaaaatgttggtgctgctaaagctcggaatttagcgattcgagaggcgagaggaaggtacattgcctttttagatagtgatgatatatggttgccgcataaattgaagacacaattgttatttatggaagaaatgaatattgctttttcatatgcgtcgtatagtttaattgatgaaaatggtaatgaattaaatcgcgaagtgagtgtaccaaaatctgttgactatcattatttagtaggaaatacaattatcgggtgtttaacggtgatgattgatcgtgaaaaaattccgtatgtcgaaatgcctagtgtacagccggaagatacagcgttatggctgaacttattacatgaagggcatgaagcaaaagggatacagcaagtattagcgaagtatcgaattgtagcaaattctgtttcgagaaataaagttagagcagcttttcggtattggaaattattaagggaccaaaaaagtcttaatgcagtgcaaagcttttactattttagtaagtatgcttatcatgcttataaaaaaaataaaatcaatgtagttgggaagacgcaattatgaatatactgttgatgactgataaattgataactggcggagccgaaaattatttctgtaaattagaaaataatttgcattatgaggattttaagatttatacagctgcaggtgatggagaactatatgaatcccttactagaaaagaaaattttatcttacttagtcgatggaatcatttgagaaatatttattatttacgaaacgaaatttgtaaacgaaagatagaacttattcatgcaaatagtttgcgaatggtattatatgcttttctacttcaaaagtttattaaaaaaaagatgaaaattgtttatacgaaacacaatgtaacgatattagaaaagaaaatgccaacgctttttcggtatttcatgaataaatatgtgaacaatattattacagtaagtgagtttgaaaagaacaatttaatttcaattcatgtagcagaagaaaaaataaatacaatttataacggtgttgatattgaaaagtttttattccagcagaaaaagaaagaatctacatataaaatagggatattagctagattatccaaagagaaaaaccatcaactatttgtcaaaattgcaaatgtgttgaaaaagagaaatgattttatgttttatattgctggtgatggaccagagaaagaatcgattatgaaagaaatagaaaaatatggattgcagcaaagggtgaagatgctagggaatatttcagagccgcatgagtttatagggaatatggacgccttacttttattatcttttcgtgaagtgtttccaatggtagtaattgaagcgatggctacagggacaccaattgtttcaatagatgttggtggaatacatgaagcggtaatagatggagagtcaggtgttttgatatctgaatattgcgaatcagaattcgcaagtgcgcttgaggaactacaagggaatgaagaaaaggtaactgctattagattgaaagcacgagagaaagcaatgagatatttctcgttaactaaaatgatagaggaaacgaaaaatatatatgaattaaacaaatgaccgagtaggtcgtttgtttttttttattatagaaacttttaagagacaactcacatattatatgaaaaaggtaatatgaggagtgaatttattttgtcagaatatatttcatcccaagaagattgtgcgccagaaagtagcgttcatattgattgttttggcgcagttccaaactcgggaaatgatagctcattagcaattcagcaagctattgattattgtgtagcgaatcgaatttcgacggttagaattacagggataaatacgtacaaaattgtaaagccgattgttattaaatcaaacgtaagattagagttggatcctaccgtaacactgcaaattgatggggattttaatgcatttgagctacaaagtaacgcttcgatagttggtggtactcttcaagttataaatccattgtttcaatctgctgttatttatgtttctggttcacaacaaatcgaagtacctaatcaatctgttatatcaaatataaatataataaatacaactccatcgtataaaggaaaagctatacatttttattgtcaaaaggcatgggattttattagtttctttcaagttaaatttattcaaattaaaaactttcaaactgcaatacatttgaagacagaatatataaatgatatcaatacaccttgctggattaacgccaatgtatttcaatctatatttattgatggatgtgtgtatgggattgaagtagatggaaatagtgatttgccaaatgaaagttcaggaaatacgtttcatgatattcaagtgcaatgtagacaacaaacggaaaaagtaattcgttgttcaggtgcgtataatacatttgattgtatgatctgggatacgtaccggatgagtagtgaacaaattgttattgaattttcttccaattctcatcgtaactaccttttttcaaatctgctttcgacaactattgtagataaaggacaatacaatgtttgtaagtctacttatgaagaatccctacgaattcagttacctttgacgttaaatagacctcatttaataggaaatcaagatgatattttagtaaatgctcagcagaaatataacgttaagcaagtaagtggaaaagtgccgtacgggggaaatctcacaaattgctttaatttaatagatgaacaaagtgtaaactatattgacgttccagatagtaatccagttgtaattgaaatggattttacgaaaaaaccaatacaaatgttaaattgttttggaatgtattttggatggggagagagcccaaagaaaattaaaattgaatatgcattaagtgcaactggaagttgggttatcgcgttggatgttccattaaatgttggcgatacaattatatcgaatatgaaggccagtcagttatataaagttagaattacattaagtggttattctcaagatcataaacgttttcgaattaatcgtatctttgcaagatcttctatggaaaatgggagtgcttggttagcgacgactggcggaagaatgtttggagatattgaaatagaggcaagtaaaggtataatcatgaagactgctagtggagtgaaatggaaagttactattaatgaagctggccaacttattacgactaaaataacttgagatggtgtttaatcgtatatccttggacgagttacaacgtagtgggatataggtaatgaaaaagagattgtaatttggtttcaaccaaactacaatctcttttttgtttcaattacttccaccaaatccaagtccaaaggtaatttcgtacatttcgaggagtaatgcgaatgaagcgttcaccgtcaaagaagcaatttaaatttggaagtgcttcatctggattttctggaacaaaggtgacgatgttttcgttacttgtaacggttactgtaattggttggtcggtaggcgagacttgaagttgtaacgaaatattggccgtatttttaaagggattattaacaggggggcttatcacttgtactgtgaataacacgataattgtttcgtttggttccaaattagtagcgactaggaaaccgatattcggattcgctagtggagagcgttcaccgttaataaagacagtgccatttataaattgtaaacctgctggaatagtatcttgtaacgaaatatttgagagtgaaatttcagaagtatttgtaatgcgtaccgtgtaatcaaaatattgatttaaataagctgagctgacggaagcatttttcgtgactgttgcagttataaattgaactggtatacgaacgatatttgaattaacaatgaaagtaataattggatcctgtggtgtcaactgaaaagcagcggtaactgttgcagaatttataattgtactgtttgaaagaatagaagttgcgagaacttgaaatgttatagttgctactgtacctgcagataaagaaccaatattaataccagtgtctggacgaacatttggaacgggagtgccgttaatggttacgctgttttctataaatgttgtaccagctggaattgtgtctataacagaagtactgattgtaggaattggggaatgattgaataccgctaatgtgaatgtaatgatatctcctataacgacaatagatttgtcagctgttttttcaatgcgaaccatcggatcaataactgtcgttgtaacggtatttgtttgttttgtaattgtaataggtggttttgttggatcaatgataacggtataggaaacagaagcatcattattaattgtagattgaagagtagaagaagatattgtcacttggaacgtaataataacaaattcattaggagcaagatttcctaacgtaataccattttcaggattctcattaggctgattgattccgttaatcgtaacactaccagcaacaaaagtcgtatctattggtacggcgtctatggcaagaaggtcttcaatcgtcacattaccgctattcgtaatcgtaattgtatatgttaaagtttgaccaggtaaggcgtttgttacatcagcagacttaaaagcaatgacattatcattttggacagtagttttgacagtatttgttgtagtcgtatttgtaacaggtacgttatttgggttgactatatagttaaaagtagtaattgcgttgttgtttagttcatttggtgttggaatagaagtcacagttacttggaatgaaacgatagcatctccaccaatagttatagtaccaattggtatgccgcttactggattcactcctggaagagtttctccgtttacaatgacgctattttctataaacgtagtaccttgaggaataatatcttgaatgattacatcatttactgcaacattaccggtttgatttagtgtaatcgtatacgttaacgtatcaccaaccgttgcaaatgcaaggtcaacagctttattactattcaaattcgcatgattaatttctgttaaagcagctgatgaaataatagtttcggtaataggtggtcgatttggtaccgtgtattcatattcaattgtactcgtgttagagattggatttgtttgtggaatcgaagtaacccgtacttggaatagaatggttgctgtcgtattaggcggaatgttatcaatttgtataccgttaagtggattgtcatttggccgagcgttgccattcacgataacactattctctataaagctcgtatttgctgggatgatatctgtaacaataatgttttctacttgtatattcccattgtttgtaatggaaatagtgtaagggataatagtttgtaggtcagcatattggataggtgttgtttttgtcgcaattacattagcagaaataacttcagtgaaggtaatattgctagtggatatttgttcttccacgtttattgtataacgagaagttgattgattttgaacatggccgctagcaggaagagctacgacggtaacagaaaatgtgactgggatagaaatattaggagcaatcgttcctacaagtatacctgcacttgggttggcattaagctgaggaatgttatttactaaaacgctaccgtcaataaaggttgttccattaggaatattgtctgtaaatacaacagcagtggcatccgtattccctgtattcgttaaagttgttgtataagttaaaatgtcaccaatcgttacagaggttaaatcaacagttttaagtgaaacgatgtcagcatcattaatttgaacaaaagtagtattggaagtagtagatttttgaattggtgcaaagtcaggattgaaaataaagtcgtagacgacgtttgcagtattaggtgttggatttacagcaggtaaattcgtaacggaaacttggaatgttattgtagccatttgacctgctgcgacattaggaatggaaaagccgatattcggatctgctgcaggaagtacagtattattaactactacacttcctggaataaatactgttccatccgctatagtatctgtaaaaaagatggagttagttgtagccgatccattattttgaatgaatactgtatattcaatggtttcatcaatgttagctaatacagtattagtggactttgtagtaataagaatagcatcaataaattgtatgtttgtagcattggaagaggtcgtttctgaaattggtggtgtgcttgggtctggtcgatactcatagtgaatgacggcgatattattaatgttattttgtggcggtatagagactacgcttacttggaacgtaacaataatcgtattatttggaagaattatatcaagattgatacctgtaattggattttcgttaagtcttggtacgccatctacaagaatgctatttggaacgaatgtggtgccagaagcaattgcgtcaagtaggagagtatttgtaataggtattgtaccagcgtttgtaactgcgactgtatatgtgatgatttgaccgatacgtgtaatggatctgttagcggatttaattgcactaacatttgccgtccgcacttcagtatttactgcatttgataacgatctacgctgaataatttgagaactagggtcaatttggtattcgtacgaggtgtctgaaatattaatgactacattgccaactggtatatttgtaagttgtacttggaatgaaatagtgactgtttcatttggttgtatcgtgccgagagttactccgttttcaggattagcgccaggctgaattacattatttattgctaagctatcttcaataaatatagtaccttctggaatgttatcaatgaacacggtattgttagctggaacggttcctatattttgtagtgtatttgtgtaggtaataatttgcccgattgatgcgaaagttatatccgcgcttttaacagaaataatatttgcgttttgaagtgatgttgtaacaatgttagaatttgcagagcgattcactggtggggctgtagggatacttacatattggtaagttgctgaagattgatttacaatttcggtttcagtaggtggattatttgtttgcacttgaaatagtatcgttttggaactgttagctggaattgttccaatcggtattccgttttcaggatttacacctggctgaaggacaccgttaattgtgacactatcgggaacgaatgtagtcccagctgggatagaatctgtgaaaacaatatttattgcgtcaacattaccgatatttttcacttcagaaatataaagtatagttccgccaatatctacagttgttggattggatgtttttgtaattgtcaattgtgcttgcacgaaatttgtaatgacgatattactagtagatgtttcagtaataggcggttgccctgggtctggttggattgtatatgttgtattggattgatttgtaatcgattctcgcgagaatgaatctttaataagaatttggaacgaaataaggtgagtagcgtttgctgctaaggtaggtaaagtaacacctacatttggattggcaccaagtatagctgttccattaagtgtaaaactattttctacgaatgtagtatcttggggaatcgtatctgaaaatatgagattcgtagctggaatatttccggtattttctagtgttattgtgtaagtcaaaatatcacctgttgttgtttgaggtgcattgactgcttttaaagaaaggatagttgcatccgaaatttgtgtgaaagcgggattagacgtaattgttcgagagatgataggagcagttggatcggcgataaaagtatagtcaatacgggctgtattagaaaattgggttcacgcttggtatagattgaacgataacctggaatgttacagtgacgatttctgacggtgtgatggagtttaatggtattcctacgttaggatcggcacctggaacagaaacaccactaatggtaacgctattcggaataaatgcagttccttctgggaccaaatctgttaaagtaactgtatttgcagtagtatttccgttattttgaacgactactgtgtaagtgattgtaccgtcagtagattgtacgagagaatctgtacttttaattacggataacgatgcatcaacaacagctgtattaaccgtattagacgaggatgttgctgtaacaggaggttgacttggatcgacaatatacgtgtaacttgtaagtgcttgatttataatcgctccttgcggtggaatagaacttgcaagaaattggaacgtaatagtagcggaatcacctggtgcgataataccaactggaataccgagagttggacttgcatctggaagtgaaatcccgttgagcgtaacactatttggaacaaataatgctccttcaggaactccgttaatgagtaatatagagtttgcagggaagtttccagtattcgttaatgttgctgtatacgtaattacatccccgatagatacaattgaacgatttgcttgtaaaacagttgtaacagtcgcgttattaatttgtgttgaagcgctattagaatttatcgtgcctgtaacaggaggagaggccggatcaacgatgaatgcgtattgaatagatgctacgtttgtaatcggatttgaaggtggagtagatgtaactatgacttggaaagtaacggttaaggaactacctgcgctaactgttccgatattcactccgttatttggatttgcgcctggaatggtacttccatttacagcaaaactattttcaacaaaggtcgttccagttggaactgggtctgagaaatttacattcgtagcgtttgtattgccgttattttgaatcgaaactgtataagtgatcgtatctccaatatttgcaaaggctgtattagcagtttttacagctgaaagtatggctgtattaatagaagtaacgaagacattcgtttccacattgccaggctgagccagtaatgcattgcctacgttatattggaagttaacaaatcctaagttttggagttcaggtgtgaacgttgttggattacttacgatttgtacttggaatatgattgtaacagtttgatttggactgattgtatttatgccaacaccgttaataatcgaagcggatggtaatggagtgccatcaacaataactgatcctgcaacaaattgtgtccacgatggtaaagggtctgagaatatagcgttgttagcaggaatattgcctgtgttcgtaatagtcgttgtatacgtaatcgtatcaccaatcgttgcaaaagttttatctcctattttaatagtatttaaaatagcactttcaatttttgttgtaacgttgttagaaataatattttttgaaactggaggattagctggattaacgatatgttgaaagctaacgctagcttgattagtaattggatttataggcggaatttcattggcgataatgtgaaatgctacgatgacagattcgtttggcgcgatatcaccgattggaacgcctgtaatgatatctgcatttgggatgctagttccgttcagtgtaaagctattcggttcaaaggaagttccgtctggaataaggtcggtaaaaataacattcgttgcactcacatttccgttatttgtaattgtaacggtgtaggtaatatcctgcccgatatctaccgtagatacatttgaatttttttgtgcagtaaggatagcgctattaatttgtgttgtcgttgtattagattgattggaagttgtaataggtggctggctaggatcaacgacataatgatatgtggtagaagcagagttagaaatgggattaagtgttggaagtgtaataacagttgcttggaatgtaacgattgccgtattaccaccattaatggaaccaatatttacaccagttgataaatcggcgtttggaatggtttgcccattagctgtgaaactatttggaacgaaacttaaattgctatcaagaatatcgataatagttacatcagttgcggtcacattcccggtattaggaaggttaagtgtaaatgttattgtattaccaacatccgcaaaagtaagatttgctgttttggtgctaataatagttgcgttgtttatttgaaggagtgtagtgttggaagtagctgcacttgaaacgggaggattaacaggatcaacagtaaattcatacgccgttgatgctttatttggtgctgggttactagggggaatattgtttactgtaatttgaaagacgatgctatatatttcatttggtggaagtgttgcaagtaatacacctgtatttggatccgcgttaggttgtaaaacgccatcgacagttaatgtgttaggaacaaatgtgagtccacttggtaatgcatctgtgaatacaatattagttgcatcggtattgcctacattggtaatagaagtagtataaaaagcagtttgcccgatatctgcaaaggatacactttcatttttggtcatagataatatggcttctttaatttgggttgaaacaggattgctaattgaagtttctgcttcaggtggtgagactaattgatacgatgttgatgagaaatttacaattgggtttgcggttggtaatgatgttacagtaacttggaacgaaactgttactgtagtcccggctgttattgtcccaatattcacaccgttcgatggatccgccccgctttgaggaactccattaatagaaaatgtgtttgcaataaatgtagtgatgcttggtacggtatctgtaaatataacattttgtgcggatgagtttccattgtttgttaaaacgacagtataagtgagtgtgtctccaatacgactaaaggatttatcgacttgttttaatgaaagaatgttagctgtattaatcgtagtaaacactgtgtttgaagtaacgtttcttgaaacaataggtgcattgggatcagcgataaatgtgtaagaagcagtagcggaattggcaataggattttgaacaggggtagaagtagcggtcacttgaaatgctatagatattgagctgttaggggcaattgatccaatcgttatgcctgtattaggattcaatccaatttgtgtgagtccatttattgtaacgctatcagtaataaatgttgtaccatttggtataagatccgtgaaagtaatattagttgcatttgtattaccgttattcgttaaaattgtcgtataggttatggtatcgcctagtgttacaagggtttgatcgaccgattttaccatcgttatcatagcatctaatacaggatttgtagcaatattcgttgaagtagaggtagtagcaggagcgctgtttggatcaacagtataagaatataaaattgtgtcattacccataattgaactggaaggggaaacggaaataacatttacttggaaagtaacagttaccgtttcaccaggagcgatatttggtatatttactccaagtgctggttgcgcaccagactgctgaacgctatttattgtgactgaatttggtataaaggtagtgttagctggaatagcgcttgtgaaagtaatattcgttgcggctgtatttccggtatttctaatagtagttgtatacgtaatcgtatctccaactgaaactatagatttatcagcactcttttttgttgttaaaattgcactattaatagttgtcgaaaccgtattagatacattcgtttgcgatacggcaggttggctaggatcgaccacatgtgcaaattgtacagagctataattagaaattggatttatacttggaatgtttgtaacaagtacgttaagagtaatcacggccgttccatttgggtttatatttccaatctgaattccgttagctggatttccgatttgctgtgtaccagaatcgtttgtaagagtgccagatatgaatgtcgttccatcagggaaagtatccgtaaaaattatattttgtgaagtgacatttccagggttatttaatgtaattgtataagaaattgtatcgccaattgttgcgaaagttttatttacagatttgattgccacaatttccccagaatttatttgtgtcgaaaccggattggacgtcgtacttcttgaaacgagtggtaagtttggacctgtcataaattgataattaatggaagcgctgtttacaaccggtgagtttggtccgcctggtccaattgtgaaaattggatttggaatgctaactacttgcacacggaaggtaacgtttataaaatctccagcaataatatccccaatcggtatcccattcgctggatttactccaggcaataaaactccgcctactcgaacgctatcttctataaatactgtgttatttggaatgggatctgtaaaaatgatattcgtagcagttgcgtttcctatattatccaataaaacagtatacgttaaaaatgaatttccaggtgctacgtcagaaaatagtcgatctacacttttcgttgcttgaataatcgcttcgttaatttgaactaaagttggattacttgtagctgtttctatcaccggcggctgggtaggatcaataatgatcgagtatgttgtgctagattggttcaaagttgggtttgtagctggtattgagccaacgatagcttgaaagctaattgttgtcgttcctccaactggaattgagtctaaagagattccgctatctggtctaaatccaagttgtgggattgtattaatttgtacgctatcaggaacgaatgaaagttcaggtggtaatatatcgataaaaacaggtgtgtttgctgaagtatttccgctattggtgaggatagttgtatacgtaattgtatctccaacagcagcaaaagcactgcttgcagtttttgttgcgataacggaagcagtatttacttgtgaaaaagttttattagattgaactgttcgtgaaactggcggttcatttatatctacaataaagctatattgaagcgatgatttgttcgggattggattcgggtttggaagtgttgtaatgtttacttgaaaactgagtgtagcagatgcatttgaattcaagttaccaatattgataccgttttgtggatttgcattagtaatagttgttccatttaccgtaaaactatttggaataaacgttgtaccatttggaattacatctgtaaaaataacattgtttgcggtagtattaccggaattagtaatggtagaagtgaaagtaagtgtatctccaatagtagcgaatgttgaattgacagttttatttatagaaagagtagcatcaataattggagtaaccgttgtattcgtaattgtactattgacggcaggtgattggttgggattcacggtatattcataatttacaagagcattatttgttaatgtgccactaggtggtatcgctaaaatttgtgcttgaaaagtaataaatacagtatcccctggcgaaatatctgccaagtgaataccaagtgatggatctaatcctggttgtgggacattattgatcgttacggagttttggataaatgaagctcctgcaccaagcccatccgttaaaacagtcgcactagcaggagtattacctgtatttgttactgcaatcgtataggtaacgatatcgccaattgcagctgtcggtgtattcacagacttagtagcgacaatagtagcgttattaatttgagttgttattacgttacttaacgtattggcggatgctggaggtaagttaggatctacgacgtactggtacgttgtattgctttggttcgggagtggatttggattcgggatagaatttacttgtacttggaacgagatgagcgtatttgcattcggatttattggatcaatggcaattccacttgctggatttacattaggcagtgtattcccgtttacagtaacactattagcaataaatgatgtcccgtttggaattacatctgtaaatattacatttgatgcaagtgtgttcccgttattcgttaaagtagtcgtgtacgtaataatatcatttacgttagcaaactgtttatctgcagatttagtagcggcaattgaggcgttattaatagttgtctgtacagtgttagaagcaaccatctgcatcacagcaggtttggatggatcatacgtatattggaatgttgtgcctgattgatttgtaattggatttacagcagggatagttggtacaaaaacttggaatgcaacggtgcgtgatgaattcgctcctattgtaccaattgaaatgccggtagcaggatttgcgttagctacagggacattattaatcgttacagtattaggaatgaagagggtacccgctggaatgatatctgtaaacgttacattagcagcagggatattcccgttatttgttaaaatagtcgcatatagtatgacatcaccaacatcagcgaagtttgtactcgttagttttgtagcaacgatattagcagtattaatttgtgtagttactatattgctagcagcgtttctaacaagagcaggtaaatttggatcagcgataaagctatattgaagtgaagcgctgttttgaattgggtttggtgaaggtagcccatttgcacttatttgaaaaacaatcgttgtaaaaccacctgaaggaatggagccgacttgaagaccggtactagggtctgcacctagttgtaaagcaccacctataaaaatactatttggtacgattgtggtgccattagggattatatcggtaaaaataacattatttgctatagtatttccaagattagctaaagaaattgtatatgtgattggttgcccgacatcggcgatagttaaatctacttctttgacaatcactacatttgctaaattaatttgtgtacttacagtgttacttacagatgtttctacagttggtggatcgcccggatttagaataaaactatactgtgtactagatgaatttatcgttgggttttgtattggtaaagaggtgacggttacttgataagagacggtaagtgagccgttagcagcaatggaaggtagtggaacacctatatttggatctgcgttattttggagtacaccattaataagaaaagtgtttggaataaaggtagtaccgtctggattcgtatctacgaaagtaggactatcagcagaaacacttcctgcattcgtcaaagtagcagtataagttaatatatcccctacggtagcgaacgctcgatccactgttttggctgaaatgacatttgcatcgtttacttgagtaaatgtagtggttgaagtagtgttcttacttacaggtgaagcgtttggatcaacaataaagttataggagatggaagcgctatttgaaatagggtttggatttggaatgctagttattactacttggaatgaagctgtaattgtagtattagcattgatgctaccaatattgatgctagttggtgtaacgcctggttgagtaacaccgttaactataacgctatttggtacaaaggcggttccattcgcaattgaatcggatagtaatacattgttcgctgcaacattcccatcgttagtaagagcgaaggtgtaagttaatacatcgccaacttccgcaaacgttttatctacagatttattagcatggagatttgctagtctaattgttgatgtaacagaattagaatttgctgtctttgaagtcggtggcaaatttggatttacagtatatagataagaagcgaaggcattattaatgataggattttgggtcgtaatattgatgactgttacttggaaagaaagggtaaaagtagccccgccaggaattgtgccgataggtaaagcgacgagagaatctacattttgcaaaactccgtttagtgttacagtaccaggagttaatatcgttccatttggaagtgggtctgttagttgaacgctattagcggccgcatttccactgtttgtaataagaattgtataacttatcgtttcgccaattgtggcaaattgtttgttagttgattttgttaatgttacattcgcattgttaatttgagtggaaacgagattagaagaaatgttttttgtaacgggtgattggctagggttgacggtatattgataagaagcacttgatccgttagatacgacatttgacgcgggtattgtatttactactacttgaaatgcaacattttttgttgtgccgcttgggatggatccaatattcacgccgttagcgggatttgcgcccacttgtgtcgtgccatctattgttaaactgtttagaacgaaagttgttccagtagggatgacatctgtaaaaataacattgttcgcatttgtattacctgtagctgtaaaggaaacggtgtacgttagtgtatcaccaatatctgcaaaatttttatctactgctttcgtcattgttacagtagcattattcacttgagtggagacaatatttgtcttatcagtcccacttactgctggttgattaggtacaggaatgtattgatatgttgttgttccactatttaatattgggtttgtttgagggatagaaggaacgagtacttggaatgaaatagtagtagtggaatttgcggcaattgacccaattgatataccattagcgggatttgctccagcttgagtaactccgttcacagttacactccctggaatgaaagtagtcccgctaggaatcggatccgtatatatcacattcgttgcagcgatatttcctatattagctaaggcaatactgtaagttaatgtttcaccaatatcggtaaaaagtttgttaactgattttgttccattaatatctgcgaggttaatttgtgttccagcagagttgcttgttgcaagaccattaaaagttgttcctccggcgattggtgtatattgaaatgtaatattagcagtgttagagataggattttgacttggaagagaaacgacagtagcttggaaagttactgtacgagaagcaccattattaattgttccaagagatataccagccgcaggatttgcatttgtttgcggtacgttatctactgttacagtgccgggtataaaagaagtaccgctagggagactatctataaaaatagcgttattggcaggaagaagcccggtgttagggatagtaactgtataagtgagaatatctccaattgcagcaacacttttattcacgcttttcgtcgcttgtatatttggtgagtttatattaatttgtaagcctactgtatttaacatatatgcgtccccgttagtagttaaacggattgcggcggatacttgtgagtttgttaaataaggagaaatatcaatggaagtaatgtcccagccctgtcttcctgcggagatgtttgtacttgtagaagcactttgatttcgcgttccgaatgtccctgttgtatctaagtttcctgcagcattattaacttgagaaccgaagaaattatttatagcattgtttggtccagataaagcatttaatgaactgaaatttggtccaaataaagcttgatccccggttaaatctgcatctccttcggtagaacttaaaaataatctcccgcttactggtcctcctgaaggtgttaaaaatccagaaacagatacatcggcactaccagtttctgcagaaacacggttaccagctacataaatggttaagtttcttgcaggtaaggaaccattttgataagcgacaatgagcgtccatccagaagaattgatagccccattagaagcatctaaaggatcaacaagtccagggacagagccggttgtataagagccagatccagcagcttgaacgagggatgttacatctgcagatcgtgtatagaatccaaatgtgacagatccagaaacgaaagtttgatttgaagctgtaatagccgaaggggtaattgagtatgttgacacaggtgttgtgaaagaaacaggattccctaaaatactcgtaatgttttgatcacgagataaatagtttccaccccaaacgagttctgcgtaaagaatagtactaccagcagggatatttaaaatagtggtagaactattttgtgtatagtttaacgttgtacctgcaggaaaagtaggtacttgtaaagcagtattcgtagttacgaatgcaccaattgcaccaattgcaccgattgtaccagcacggttttgattgctaattttacttaagcctaaagtattacctgtaatagcgagtgcgccgttagtggtggtagaaaatcgattcgtaatgggcatgttgtcacctcatttacaatatagtcttggtcaaaataacatatgtgtgtgacaaataaagcgaaacatgtacaagttgatttcgtaataatgatttaaatgtctagataaggggatggagtatgattgaattagaaattaggttggagcgtcttagggaagaacaaataggcgatattgtagcattgtcttcttatattggctgggattataacagagaagaagttgaaacaatttttaactcaggtattgtatacggcgtatggaatgagagaaaggaacttattgctagcgcggcaataatattatatggggagaaattagcgtctatcggaatggtgattgtacatccagattataaggggagagggattggaaagataataacggaagcgtgcgttaaaagcgtatcagctcatactccaattatgctgattgctacggatgaagggaaacctttatatgaaaagttaggatttagggcagtaagttatgtttctaaatacatatgtaactcatacaatgcgaaagattattgtgtaagaaatgaagattatgtgatgaattatgaagagggtgatttagaaaaaataataaaaatagatgaatatgcgtttggaacaaatagaaaagagtttttaaagaaaagaattatgcaaagtgaacagtgtatcgttgtaagggacaaggaacaaaatgtattaggttacggtttaagcatacaaacaccagaaaataagataatagggccggttgttgctaaaaatgatgagatggcaatgagaatagtacatgatttagcaagagggcataatggtaaattaagaattgatgtactagaaggaaagaacgatttcatgaaagaattagagattgctggttttaaaaaggtgaatataccgccaattatgatgaaaaatagtaatcggttaataaacagaaatagtgaactatatagtattgcagcgcaaatttttggataaaaaagaacccttttaaatgaaggattcttttttgagccaatttaatcacgatattggtcatgagttggctgaaagaggtcttcctcgatatctcgcaccatagaaaaatgatcaacgttataatgaccgtgtaaagttttattgtgatgaccaataatttgttctgcagacaatacgttagaatcagttgttgaatgaccgtttttaattaatgtaacgtcaaatccttgtacagttgctgtcctaacggcagtgtcaatgcaatgttctgttttacatccgcctataacaatatgattaatgttttcttcttttaaaagttcaagtaaagaagtaccgtagaatgaattggttgctgctttattaataaagattgcagactggggtacttgaatttgattatgtacttcaaatccttcgccactaccagaagcaacatcgatatctcttacgaaaacaataagagcatttgaatctattgctttctggagggctatatttagtgtagataatagctcggttttacgaaaaacttcattttcttgctcatttccatcaattaattcttgctgagcgtcgataattaatagtgcttgtttcatcgtgtctcccctttaatatgaaataagttccactgtacatattccttcagattattagaaaaccctccattgtaagagaagtagaagattgatttacaaagttgtcaaagaaatttcattctcatagcgtgtaaaaacatgtatgataggagatggagaatttttgagtaggtgggaataacatgcaaacagtagaagattatctttcattcttacatacgaaaggatttaaattatcagaggaagcacaagggtttattatgtttggacaaggatatactggtgcgtctgatgggattgtgaacgcagcaatagaagcgacaattaaacatcaattgcagtttgatggtagttatttcgttgcgttattagaacgattgaaagaggaagaaattacagataaaaaaagcgctaaggcttttatgcggaagttacaagcgtaacttcacgcagcctgcgcttctttttttgttttggaaggtaattcaacaaaaatcatgcctagaaaaatacatagacatccgataatagcagaaatagaaagttgttcatttgcaacgagaacgcctgttaatgcagcaaaaacgggctccattgcgaaaataattgctaccctcgttggagaagtgtgtttttgtgccgatgtttgaatgaaaaaagcaatagatgttgcaaacagggcagttagaaagagtgcgaataaaaaggattgattcgtccatagtgatactgaaaataacttttcccaatcttcaaacaaaaaagcgcaaatagaagaaaatataccaacagctaatacttgagatgtgcttaataataaaggtgatattttcttagaaaagaagccgttaataagaatatgggcagcgaaagcgactgcacaaccgagaacaagtatatctcctatatttaattggaaagaatcagcagctgttaataagtataaacctgttgtagctacaacaataccaagtacgatgaaaatggtagctttttgttttaaaaagataaaggaaaagattgggaccataacaatgcttagcccagttaagaaacctgcttttgaagatgttgtatagagtaagccaaatgtttgcaataaataaccgacaaataagaagaacccaactattaatccggctaaactactatgttttaattcttgttttgaagttttctgtgagaaaataatttgaacgaataataaaataattccagcgaataaaaagcgaataccattaaacgtaaatggaccaacgaaagacatagcgttttgaacgacaacaaacgtagctccccaaataaaagagacaaataataaagcaagaggagcaatccactctcttttcacactcatacccccgttaattttgtaagatagcttttctagctaattcatcagctactttattttgactacttggaatccacttaataaaaaagagatcgaagttttttatgtactgcagtgcttcatctaaaagaggtgcaaatattttattttttgcgtattctttttcaacagcccgttcgacaagctgggaatctgtacgaaaagagacagtgctataattatgctcgatgcaatattttaatgctagaagtaaagcgcggtattctgcttcatgattggacattgttccaagtggtactgataattgtacaggcggctgaacgcctttaataaacactcctgcaccagaaggaccaggatttccttttgatgcaccatcaatatatacttcaatcaaaatgagaaacctccaaattataagattatcccctacttaaatatttttttgaagtaggggatagggtagttatccgattgtgatgctgtaacgacatgtaaatgtttcattcgcttgtaaagattgaattccctttttgtccttgaaatcttttgctggatttacttcatcagcgattccataccaaggttcaatacataagaaaggtgcgttatcccctggtgtccatacgccgacaaatggaaatccatcaaattctacttttacaaatttattatgtttatgagaacgaatcgaaatttcattcgtattcatatgttcaaaaataagtgcatcatttttgaataaatcgtatgtaagtggcaattcagtcgtattttcagcgattaattgctttttgtttgaaagataaggcccttctaatacgcttgtttctaagcgttccgaaccattaaacgataagtgataatctgtaaatgattcaccgtccaataaagggaagttgaatccaggatgtgctccgattgagaagaacatttctttagaagtaggattgtttacttcatatgttacatgaacactttgtccatctagctcataagaaacgagtaattcgaattcgtatgggtatttttttaatgtttcttcattactagtaacgatataagtgatctttgtttcgctttgttctttcacagagaaagtaagatcacgagcgaaaccgtgttgtgttaatgaatatggtttaccgtctacgtagtatgtattatctactaatcgaccgacaattgggaacaaaattggtgcacggcgtccccaataagtagaatcaccttgccataaatattctatgttgtcttcttttaagcgaacgctctgtaattctgcacctttgtcagaaatggaaacgatcactttttcattttgaattgttgctgtcatgaagtgaaacctcctaaatctttcatatgtttcattatacgttgtctaaaaggaaaaaggtagtttatgataggaaatctattgacgaaagaggggctaccacgtaaaatataatcttgttgctaaaaaaaagaataacgtggttcgaaaccatcccacgtaaaaaaactaaggagattttgtcatgaatattagaacattagtcggtaatggtattttagcggcattatatattgctgtttctatgcttattcagccatttggctttacaaatgtacagtttcgtatttcagagatgtttaatcatctcgttgtatttaacaagaaagcaatttacggaattgtattaggtgtatttttaacgaatctctttttctcacctatgatcgcttatgatttagtatttggagtaggccaatctattcttgcgttagttgcaacgattatttctatgcgatttattaaaggtgtttgggctcgtatgatttttaatacagttatctttacgattacaatgtttatgattgcaattgaacttcatcttgcattgggtttaccatttatgttgtcttggttaacatgtgcaatcggtgaatttgttgtcatggcgattggtatgcctgtaatgtactggattaataagcgagtacaatttgaaagatttatgtaatagatgaaagagctattcctatagggatagctctttttgcatgtgataatattgaatataattctttgactcttgataaaatataataaaataaagtgaggcttttattagctggctacatataagaagtcttacataaggggaatgtagtatgaaatataaaattcattggttgtataaaacgaagcgcggattgcagacggaattaacaacagagtatatgaacatagaagaaatacttcaatttgcagaggattttgagaaaacaggaagagtaaaagaattttcattttatgatgaaatggacgcagaatggtcattaaaagagatgaaaaagttaagtaagcaagtagaggaagagccccaagaaatactcgtttattttgatggggggtatgatgtgcaaacgaaagaagctggcgttggtatatgtgtgtattataaaaaaggaaatacaaactaccgcattcgccgcaatgcatatatagaaggtatagatgataataatgaagcggagtatgcatcactattatacggtatgaatatactcgaggaattagggattaaatatgaagcagttacacttcgcggcgattctcaagttgtattgcagcaattagccggagaatggccttgttatgatgagcatttaaaccattatttagatcaaattgaacaaaaggcgaagcaaatgaaattaaaacttgtatgtgaaccgatatctagaaaacaaaataaagaagcacatcaattagcaacgcaagcattagaagggacagtcattgatagtcataaagaaataaccgaatagagaggtgcaaaggtggataaaaagcaactcattacagaggtaaatgacttattagaaacatactgtgaaggatgtttcttgcgagaacataatcgaaagacaaatagtaagtattatgctcattcattttgtataagacaatgtacagttggagaaacattgaaaaagtatggagaacagttgtcataaaaaaacatccagagaaaattctctggatgttttttagtgctttgcttcgtttaattgctgctcgcatttgcttagtttcttttcctcgttcattaaaaatggttcatctaaatctactgcaacagatttcataatttcaagctgtgagcgagctgcttctactgcagtagtggcatgctctaatgtgtctggatccattgaaattgttgcagaacctaccatcttttgtgctgtttctacacggaattttacttcttcaaaatcatttacttctgatcccattgttactgcctcctttgtatattgcgcatttcacatagtttttgctctgtaaaacggaaatatacaaaggaataataaaggaggttaccaagtaaggtaacctcctgttatatgttggattaaagttttactacgttagcagcttgaggtccacggttaccttcagtaatgtcgaaagatacttcttgaccttcttctaaagctttgtagccatctccttgaatagcagagaaatgtacgaatacatcgtcagcgccttccatttcgataaatccaaaacctttttcgttgttaaaccattttacttttccttgcatgttataattcctcctaaaagcgtttactattttcatttagtgaaattcatttgaaaaataatataaactaaaaatgctatattcttgaatattctgctaaatgattaatttaaatatacacgaattgggagaatttagtcaagtaagcgattttattttttgtatttttaaataatttttcagtcgaatttttaaataggtataggacaggccgagtatgtaatattcttaattgaatgctatacataatgaggtgaaagaatgaataagtcttacttattagataatgaagaaatgagaacgagaaccgacataccggattgggttgcaaaagaatttgagattttttcaagtgtcgtgttagaaccaacttttccatgttatttcggtttaacagctttgaaaaagaatgaacttcgctattcatttctttctcataatgattggagtcatttgccacatacaatgttatcttttttagagttaatgaaagagaggccgattgtaagaaggggctttttcctttttgtagaaccggaatgtgaagaacaatcactcgaatattaccgtgattccttttggaaagtgctacagtatttacatgaaaacgataatcaagcatggccaaagcaaattcctgaagatccagatcattatttatgggaattttcatttggtggtgagccaatatttgcatttggaaatgcgccagcttataaacaacgaaaaactagacatttagggaattctctcgttattgggtttcagccacgcactatttttgatggattagagggagatcgtcctaaaggagcatattcaagacaaatggtccgtgagcgagttgaaaagtgggatcaattgccgaaacatcctaacattagtcattacggtgacccagagcatcgtgaatggaaacaatatttcataggagacgatgtagagctaataaaagggaaatgtccttttcttcataggatagaaaaataagagccatcatctggatggctcttttgtatattttggataaaaaagggtattttattacgaaagctagtctattttttcaaattatatcattaactagtaataaagagagtagaaaggatagagcgatgtttggagcaattatacagcaaatcgtattaggtatatcattagctgcgccagtagggccgattaatattgaaatgttaaaacgaggaattgaacgtggtttttggcacgcttgggttgttggaattggtggaatgactgcagatgttttatttatgcttctcatttatttcggtttatcttctgtgtttatgtatacatatgtacaagccttcatgtattgcacgggttttttcttgttattttatttaggatttcaaagtgtaaaacaaggaattttcgaatcgaatatggaatataaaaaagaagaggtaggtggccttaagcaatcgtttatggcaggatttttaattgcgatatccaatccattaaatcttgttttttggtttggtatatacggaagtacacttagctcattacttacgaaggtaacgaaacaagaagcttttttgtacagtctttgcattattgttggtattattttatggaatttaaatattgctttttctgtacattttggaagaactttattaaaaccaaaagcgcttggctacataacagccggagcaggtattattttagtaggttactctatacattttgcatacaaagctttacagttgttcacataagattgaaggggagatttttatgtatcgaaccactattgacggaaaagaaattataattacgttagcgccaaaaatccgaaaagaaattactgatagaaatccactatatgaagcggtatttcataatgctgcaagattgttacaaacaaagcaaccgacgtttgcagtaaatcatgaaatatttgggctcattattggagaagtgcaaagaggagaagtaacagtgtttgcagtggaacatattattccgaagcaaaatatatttggatcaaacaattttttctcggcaatagaacagcaggcaaatttgtaaagtgaatagaataagaatagaaaagaaatagtcgtaacgatatgttgcggctgtttttttgaaaaagggggaaacaagatgaagaaagtggggaaagagttctttttacaacatgatattgttattatgtatagcattctatttatttgcattattattttaaaaatgcaattttttacgtggtttggcatgttagcatgtatgtttgggattgttttctatacacttaatgaatatatgacacatcgttttttattccatataaagccacctaaaaacacatttctattaaaaatgttaagaagattgcattatgatcaccacgtatatccagatgatttaaaacttttgtttttacctgtatggtttagtatacctagttttactatatatttacttatagcatatggtattacaaaaagtgttactattgcactttcatttggaatcggaatgattattatgctgctcgtttacgaatggaaacattatattgctcatagaccgattcgtcccgtcactaagtttggaagatggctaaaaaaacaacatatattacatcattataaaaacgaaaagttttggtttggtgtttcaaatccagtattcgattttatatttggaacacttaaagatggaaaagatgttgagttaagcgaaacggctcgtaatttagaaaaggaaaaaaagacaaaagtagtgcgttaagcactgcttttgtcttaatgaggataaataagtaaggtgtcactttattttgaaaaagtatattaaaaatttaggggaaattgccgaaaaatgtctatcaaaaaatctttgcatgaatgcatggattgtctaaaatgaatataagtttctgaatatttataaaatttagtctttaggtatgcaagggggaagtgtattttaagtaagagaggggatcggttaatgaaacgagacgatacgtcagcacgtaagttgcaaaatgaggtgaattatacagaggtcgttcagtcggaagaatttcaattgttattaaatacgaaaaagaagtttatcattccaatgagtattttcttttttagtttttttatcgcattacctattctaacatcgtattcaaaggtgcttaatacacctgcatttggagacgttacatgggcgtgggtatttgctttttcccaatttattatgacatgggcactatgtatgatttatagcaaaaaagcagaatcatttgatgaaatctcccgaaaaattttgcaagatatgcaaaaagggaggggctgaacttgaatactactgcatttgcactatttttaattattgttcttggtacgctcgtcataacctattttgcatcgaaaaaaacgaaaaatgcgagtgaattttatacggctggagggggattaactggttggcaaaatggtttggccattgctggagattacatgtctgctgcttcatttctcggtatagctggagcaatcgcattaactgggtttgatggattcttttatagtatcggttttttagttgcttatttagttgtactatatcttgttgcagaaccgcttagaaatttaggaaagtacactttggcggatatgattgcagcacgctttgacgcgaaaaaagttcgcggagttgcagctcttaatacgatgacgatttctatcttttatatgattgcacaattagttggcgcgggtgcacttattaaattattattagggattgaatatacgacatctgtattaatcgttggaacacttatgacggtgtatgttatttttggtggtatgacagcaacgagctgggtacaaattgtaaaggctgtattacttatggccggtacgtttattatttctgttatcgttttcgcaaaattcaacttcagcgtgactgaaatgtttgcccaaatgaaaacagctacaccattaaaagattcatttttaaatccaggtgtaaagtataaggatggccttgatacactttctttaaatttaggactagtacttggtacagctggattaccacatatacttgtccgcttttttacagtacgtgatgcaaaaactgcacgtcaatctgtcgtatatgcgacatggttaattggtgcattttatattatgacgattttcttaggatttggtgcggcagcgtttgtaggaaatgaagcgattattaaagcgaacccagcgggtaatatggcagcacctttattagccaaagcgttaggtggagacttcttatttgctttcgtatcagcaattgcttttgcaacaattttggctgtagtggcaggtctcgtattaacggcagcatcagcattcgctcatgatttttataatgagatcattcgcaaagggaaatcatcggaaaaagagcaagtatctatggctcggtatgcatctattggagtagcgatattatctatcatacttgcattatttgcccaaacattaaacgtagcatttttagtatcattagcatttgcagttgcagcgagtgcaaatctaccagtgattttatttacaatatattggaagcgttttaatacaacgggtgctatttcaggtatgatcgtagggctcgtatcagcaattgttctcgtagcgttgagtccgaatgtttggaaccctgtagctggaaaagctatttttgttggggaagcgatattcccatatacgacaccaggaattatttcaattccgctcggatttcttgcagcatatttaggaactgttttatctagtaagaaagaagatgcagcgaaatttgatgaaattcttgtgaaatctaatactggtcacggtattagtgatgcgtcttcacattaaataaaagaggagcttttcgatagataagaaaagctcttttttcttttgtcattttcttgtaaatattactgatttgtaagtaggatttgtcttaattttgtggaatgaaaatagcagggagaaatttaagtcatcatggcaccagcgcagcttttgtgaaaaataagttgttatggaaggtggaagtaatgatgaaaacgaagcaaactgatgaattattagcaaaagatgagcaatatgtttggcacggaatgcgtccctttagtccaaatagtacaatggtaggggcaaaagctgaagggtgctgggttgaagatatacaaggaaaaagatatttagatggtatgagtggtctttggtgtgtgaatagtggatatggaagaaaggagctcgcagaagcggcttataagcaattacaaacattatcatactttccaatgtcacaatctcatgaaccagctataaagcttgctgaaaaattaaatgagtggcttgggggagagtatgttattttcttctcaaatagtggttcagaagcgaacgaaacagcttttaaaatagcaaggcaatattatgcgcaaaaaggtgaaccacatcgttataaatttatgtcacgttatcgtgggtatcacgggaatacaatggcgacaatggcagcgacgggacaagcgcagcgtagatatcaatatgaaccgtttgcttcaggctttttacacgtaacaccaccggattgttaccgtatgcctgaaattgaagggcagcatatttatgatgtagaatgtgtgaaagaagtcgatcgtgttatgacgtgggaattaagtgaaacaattgccgcttttattatggaaccaattattacaggcgggggcatattaatgccaccacaagactatatgaaagctgttcatgagacgtgtcaaaaacacggtgccttgcttattagtgatgaagtaatttgcggtttcggacgtacaggaaaagcatttggatttatgaattatgatgtgaagccagatattattacgatggcaaaagggattacgagcgcatatttaccattatctgcaacagctgtgaaaaaagaaatatatgaagcatttaaagggaagggagagtatgaattcttccgacatattaatacatttggtggaaatccagcagcttgtgcattagcccttaaaaacttagagattatggaaaatgaaaatttaattgagcgatctgcgcaaatgggttcccttttattagagcaactaaaagatgaaattggggaacatccgcttgttggggatattagaggaaaaggtctattagttggaattgaattagtaaatgataaagagacgaaagagccaattgataacgacaaaatcgcaagtgtcgtaaatgcttgtaaagaaaaagggcttattataggacgaaacggtatgacgacagcaggatataataacgttttaacattagcgccgccgcttattatttcaagtgaagaaattgcctttgttgttggaactttgaagacggcgatggaacgtatttaataaatagagagaggagcgagctgtaatataaggctcgcttttgttttttagtaggaggggacttttaatggagaaatatgatcctaacaaacattatcatatcggatattatgaagacggatatgatttagaagtgacggcgtacaaaagaataaatgaaccagtttgggatgcttatcttccgcactatgaggtagacgatttttacaaaaagtggagaaaatgaagctaggtgaatatatagatgactatggtattaaagtatattcatttagtaatgacatcgatgatgaagaagcacgaactatttttgaaaactggttaaaaacgaatggaattgtttaaagataaaatgaaaaaggagattactatcttgtaagatagtaatctccttttcttattcttatagtaaatttacttacttacttacttgcttgctttcattgctttatcttttgcaccaaaagtgtattttaacattggtggtgtaatcattgtagttaaaataacgacaataacgattgctgtaaagtaatcttgtgccaatagacctgaagaaagtcctgttcctgcaatgataagtgcaacttcaccacgagaaaccataccagaaccgataattgcagaagacttagcatcaaatccagtcatgcgtgcaccaacaccacaaccaattagtttcgttaatacagcgattactgttaatgctaagatgaaccaaatttgattgccaataccgtcaaatgtaatattcataccgatactaacgaagaatactggaacgaacatagcgtaagcaattggttctactttcttttctacttcatgtttgtagtttgtttgagaaattgcaataccagcagcgaaagcaccgataataccagcaattcctaatagttcgccgaaatatgcgaatgagaaacagatgataagagctgcgctcacgatagactcagatacgcgcagtggtgacaaccaacgcataattgctggaacacctttccatccaattaaaataatagaagcgaagaatactactttcttcaagataatcattgttaagttaacatcatcagtgcctaagaagctcattgcgaatgctaataaaataacaacaagaatatcatcaaatacagcggctccaagcatcgtcgtactttcacgtgttttcattttacctaaatcacgaagtgtttgtacggaaatactaacacttgtcgcacatagaagtaatcctaagaatacagcgtttccttgttccattcccataacaaggccggaaacgtaaccacctacgaatggaagaataatacctccgagtgcaactgctaaagaagaattacgattggcgtttaattcttctaagtctgtttcaagtccagccataaacattagaagaataaccccgacattacttaattgagttagaagctctgaattttcaatccaacctaatacagctggaccgataacgataccgacaattaatttacctagtacagaaggttgacctaatctaacactaagatcaccagcaagctttgtacttaataaaataagtgcaatttgaaagaaaaattcgaattccatctgatcctctcctcatcatttttagttttatcatacgatttctcggaatttgcctaatgaaaatatgtaaaacccattaaacaaaagggtctgattacgagttcttttgaacttgtaatttgaacctgtaattaatatataatatattttgcaaaaaatcaatgaaaaaatgggagcttttttagagagagacggtgttattagagatatacatataagaatagtgtgtgaatttttatatgtatgaaatagtatgaagtcctttttcattacaaataataaagcctaaatgctatttcacgaattataaatgtgaaaaggaggttttatcatttgaattcattaaaaaataacttgtctattgttgctttaggtggagtaaatgaaataggaaaaaatatgtatgctatccaatatgaaaatgatattgtcgtcattgattgtggatctaaatttccagatgaaagtttattagggattgatttaataattccagacgtcacatatttgcaagaaaataaagaaaaaattcgcggtttagtagtaacgcacgggcatgaggaccatattggcggaataccatattttttaaaacaactaaatgtaccaatctatgcaacaaagttaacgttaggtttaattgaaattaaattaaaggaacacaatcttcaaaatgatacggaattaatcgttattcattcagaatcagaaattgattgtggttctattaaggcaaccttttttaaaacgaaccacagtattccggattgtctcggtattgtttttcatacaccagaaggtactgtagtacatacaggtgattttaaatttgatttaacaccagtaaataatcaacatcctgatattcataaaatggctaaaataggaagtgaaggtgtactagctttattatctgaaagcacaaatgcagaacgcccaggttttactccatcagaaaggtcagtaggagaacgggtagaggaaatatttatgaaagcaaatagaaaagtaattatttctacatttgcttctaatgtgaatcgtgttcagcaaatagttgaagcttgcataaaaacaaatcgaaaattggctttgctcgggagaagtatggtaaatgtagtagaagttgctctagagaaagggtatttacatattccagacggcatgttgattgaagcgagtgagataaatcgtttagatccaaagcaggtagcgatactttgtacaggaagtcaaggagaaccgatggcagctttagcgcgtttagcgagtggaaactatagacaagttgatgttttaccagaagatacggttattatagctgcgactccgattccaggaaatgaacgtaacgtttcaagaattatagataatctatttgctttaggagcaaaagtaatttatggatcaggtagttctactggagtccatgtatctggtcatgcgtatcaagaagaattgaaattaatgctcactttaatgaaacctaaatattttatcccaattcatggagagtttagaatgctacatcaccatagtttgttagcagaatcaattggtattgaaaaggaaaatatctttatcgtacgtaatggagatgttgtagatattagtaatgaagtggcaattcaatctagaagaatacaggcaggaaatatatatgtagatggattaggaattggagatgttggaaatgcattattacgtgatcgtaaacaactttcagaagatggaatgctcgttatagttattacttttaataaagtggatggagaaataatttcaggtcctgatattatttctcgtggatttgtctatgttcgtgattcagaagaatttttaagagaattaaataaattagctgttattacaattaataatttaaagaaagagaatgtgaatagctggggtattttgaaaagggaggtaagagaagcgttagggaagtatatatatacaaatacaaaacgaaagccgatgattcttcctataataatagaggtttaatagtaaaaaaagaattctcgtatgggaattcttttttgttttgaagacaaaatgaacatataatgaaataaatagaaatggaaggaaataaaagatgttattaaataaacgttttacaattggagaaatggcaaaaatgcataatatcgcagaatctacattaaggtattatgatgaaaaaggaatttttcatccgtccattgttgatcctcaaacgaattatcgttattatacaatcgatcaattttcactattagatacgattaagtttttacgccaattaaacattccattaaaggaaattaaaaaatatattgatgaaagaaatccagcatacgcactcaatttactggaaaaacaacaagagatgatgctgaagaaacaaagagaaattgagtatgctttagcgaaaatggagcatagaattcatttaattaaggaagcaacaaaagcaaaagctgaacaaatggtaataaaagagatcccgcagcgaaaaataacagctattgcggttgccccgaatacgacggatgatatgtttgagtactacattcattcgttgcaaaaaaatatgaggcaaatggatgatagcttattttctggagatattggtgtaactgttgcgaaaaaagggttaatgcaaaatgagtttcaagcatatagcagtgtatttattcttttggattatatgccttttgaagtacagagttcagatgaaattaaagaaggtatgtttgcctgtgtatatcatcatgggccatatgaagaaactgatgaaacatataagaagctaatgaaatatattgatcaagaaggatacgaaataagtggagatgcaattgagattgcattaattgattggtctgtaacagaagatcctgaggagcaagtaacagaaattcaaattcctataatgaaaaaacaaagcaataagttatagggctcgtataattacaaatgagcatcaaacgcgataattaagtcacctattttttaattctctattgaccttaaagttacttgaaggtttaaactaagaaaagagagttgaaaaaaaggagcatattagagtatggaagcaacagaaaaattaagagaaaaaccaattaaaagcttatttatttcttatttaataccagcagttcttggaatggtattaatgtcagtgaatattgtaattgacgcggttatgattagtagaggagttggggcgaacggtttagcaggagtgaacgtggctattccagccttttcgattttcttctctatttcattatggatcggaatgggcggggcaacgttatactccattgcattaggtgaaaataaacgagaaagagcaaggtctatttttactcaatcaatgacggtagcagttgttatcgtagggattttagcagcgatttgcttatggagaatagaagatttagcatacttatttggtgcaaacgaagtgattctaccatatgcgttagactatttacacgtattattaacatttggaatgatatacgttttagaaaatattttaagtacatttatacgaaatgatggaaatcctaatttagcaatggctggtcttgttgtaacggctgtattaaatatagtgtttgactatatctttatttttatctttggatggggcgtaacaggtgctgcctcagcgactattctttcggcagcgattggtttccttgtattattaacccatttctttagaaaaagtagtattttaaagtggacgaaatttcattttgaatgggatactgtcaaacaaattatggtgattggtttcccaagttttacagcagaaagtacggttgcaatcgtaacgattggttttaatatcgcatttgtccaatatgcaggagaagtaggagtagcttcctatgcgatggtgaatagtattcatgcaatgacattactattattctttggtgttggagcagcattacagccaattgctagtttccattacggggcaaatttatcagagagacttcgtgaaggattgaagtttgctgtgaaaattgcagttgtccttggaggcgttgcgataattgtcggattattcttcgggaaatatatcattggtttatttgatgttcaatctccagaattattggagttaaccttaacaggtattagtttattctttatccaatacgtatttttaggttataacattgtgtatggagagtacttccaatcagtgcgacaaacgaagaaatcagtacttattataatgagccgaggattactatttattattccattgttatggattatgccgaaactatttggtataaatggaatttggctcgttatgccagttgcagaagtaatgacagcgattatcgtatttacgatgaatcgtatgaaacatcctgttccattaaatatggcaggagagaaagaagcgatatgataaaaaatccccttaagcaattaaggggattttcttattcctttaaactaatagcaaaagatccatccgtttcttgaacagaagcaaaggcaacgtttttaatatttgtaattcctttttcttttaattctttatataaccatttttcatctttatgtattaactttaagttatcatattgaatttgtgaatcgacgataagtgcaattggtaatccagcatacttaacatctatgtttaaatcttttggagttaatggtacaagttctctttttggtaaaatactaatagcgccgttcgcttctaaaatagcgtattcaatttcatgaacacttggatatcctgcaacgcgaagattagaaagcagttctgcaatggggtatctacttttttgtaagttctcaaaaataatatcaccatgtttaattaaaatgatagggtgtccgagaataaaacgatttagtttgttgaataggcttaattttgtaaggagtaaatgtaaacatgtgataacaaccataccgagaaatgcttgtaaagcaccagagacgggtatggcctggaaagctaaataagataaaaaaattatagccccaaaatcatgaggagttagttgcgctaacgcggatttaccgagtaacttaagcgatagcaaaaataagatgaaaaagaacgacacgttacataaaaagagaagcaatagagacactccttcgtgtaaagttgtacttactattcccgaaagtaatataaatattacctttcagaggataaattagggtttattggaatttgtctgtatacaaacaaataaatggatattatcatgaaggaagtaaaagaaaataggagtatatgaatatgagaaagaagaaaataatgaagggcattttagttgttataatgatttgcgccgtgtatgcggggtttttacaatatcacatttataagcatgggcatatgaatgcaacatacgatgctgattacataattgtactaggatcgaaagtaaatgggacgaaaccatcttattcattgcaatatcgtattgataaagcagctgaatatttaaaatcacatgagaaaacaatcgctatcgtatctggaggacaaggaaaaggcgaagacatttcagaagcattagcaatgaaacaaggactaataaaacaaaatatcgcagaagaccgcattataatggaggacaaatctacgagtacagatgagaatattacattctcaaaaccgttaattccagccgatatgaaaaaaggtatgatcgtaacaaacgattttcacatgtttagagcgaaaaaaatagcggccaaacaaggtttacaattagaaggtcttccggcaaaaacaccgaaaccaatcatcattccatcgaatgtacgagaatatttagcaattacacagtattggtttatgaatcgaatatagtgaaagtgatcccgtctgaaactcaggcgggatttagtttgaggaaaatcttacaaatatgtcacgttcgtgaaaggtaaagcgatagtttctagaatgatttcctgacataatgaaggtaacaaaaactatttagaggtgaatcggatgaaaggaaataatattttatcttcgttatgttactttagtatcttttttgcaccatttttactaccaattatcgtgtactttgttgcagaagatgaagtgaagtatcacgcgaaaaaagcattttggtcacatgttttcccatacgcaatcttatttggaggactagcagtatcaggcatgtacggtttaggtttcaatcaatctgacggtgctggaattggaatggctatcacatatgcagtgttcattcttgtaggaatttactacttcatttggaatatcgtaaaaggtattaaagttttgaaaacggcgtaataagataattataatttcatttaccgtatcgataaacgttttaaaaaagggcaattcaaaaagaattgctctttttgtgcttataagttgtgaaaattgaaaaagatatgttaatttttcattatgaagagaaaaaaggagtgattttcatgaatgagatcatacataagatggagcaacatgtttcagttcgtaaatataaagaagaatcaattccgaaagatgtagtagaaaagatggtgcatgctgcgcaacatgcagcttcatcacattttgtacaggcgtattctgttatatatgtaacagatcaggaattaaaggctaaactagcagagctatccggaaatcgccatgtgaaggactgtgcagcattttttgtttgttgtgcagatttaaaacgacttgaaattgcatgtgaaaaacatagtacagagataaagcatgagggagtagaagactttatcgttgcgacggtagatgcttcactttttgcgcaaaacttagcactagcagcagaatcgttaggatacggtatttgttatattggtggtattcgtaataatccgagagaagtgagtgaactgcttcatttaccggataaagtatatcctgtattcggaatgacagtcggtgtaccagatgaagaacatggagttaaaccacgtttaccagtagcagcagttcttcatgaaaatggatatgatgaacaaaaatatgatgaattactaaacgaatatgatgaaacgatgaacgcgtattataaagaaagatcatcaaacaagaaaaacgtaacatggacggaatcaatgagttcgtttatgtctaaagaaaaaagaatgcatatgaaagagtttttaagtgaaaaaggattaaataagaagtgagtaaagaggcaaacctgtgatgcaggtttgcctttttgagaaggagaaatacctaaggccagaaagttgtttattctttctgaacttaggtattttgtttgttatcatgtacatagaaataaaaattaataattttttacaaaagtgatagaaaatgagaatgaaatgccaatagtaagtaaaagcggcataatagccgctttttatcgttttatttagtatttgatttgaaatattttccttatgaaagaaagattattgctaattgtaaactgtcaataaagttatttaagttttgatatggaataccccgccggaaaatacagcaataatttcgtttgaacatatctgttattgcacgatctaaagcatcttctataacaagttcaaactttcaataagaagataaccccctgtacaacttaaaagaatgtacgtaaatattttaaaaatccgttgattaagccatttaaaaataatttgacctataaacaaacctaaaaatacaattggaatggcataaaaacttgattcccaaatggttttgtttgtgccagtaaagagtatttgagttactagactaatgaaatatataaacagataaaaagctaatgtagttgctcttaacttctctttttcagtattagttcctgtaaaataaagtaacaggggtggacctggcataccgatacttgtcgttaaaagaccagataatccgccagctatgaaatctctagattgtgttgatttaaccttaacgttgcatattagcaacaatgttaatagtaagagtaggatgctaactgctaatttaaaagtgtttatgttaacggaaatgaaaattaaaatgccaaaaggaacaccaactatacttccaaaaataaaccttttcagtagaacaaaatcaacgtccattcttattttccaaatgagtgaaatggagataattaaagataaaataatgtttatttgtatagcttcttgtggtagaaataacataagtaagaaaggggttgccattatggaaaagccaaaacctgtacttgcttgcagaatagaagccactaatataatacatatgaaaaagaatgtgatacccaaaacagccctcctatttaatcaagtttaactagttaaagtctattatttaagtgcaatgtttcacaaacttatttgtattttaacataaatatctagttttttctcaaatagtgttgccatataaggctctttaactaaaaaatctgacttgtatttttaaacaattttattatggggaaacaaataatgaatgggatcaaaatgtattgattatcattaaattattcactgagatccccgcgataaaacaagaacagccatataaaacttacaaaaatacagcatgtagctaataaacagccaatcatttgaggagaaagaatttctaacagccctcctgtaaaaaacatcgataactgaataagagatccgtaaatggaataatggaatgaaaaaactttacctatcatattttcgtgtgtgtaagtttgaagtaatgtcgtatcaagtggaacgatgattcctcctgctatgcgcatacagaataaagtaatgataccgataataagttgatcggatagaatgaatccgagaaagaaagttccttgtaataagtaggcccaaccgaatacttttttcattttttctttattatgggatatataaagattaacgagaaggcttcctatcataagcccagccccttgaaccgtatataaaatcccaatgttcgtatggaaaattttttcggcatagatcgttagaagtagttgataagcacctccaataatcccccatgaaatgccgacaagaattaatgttaaaatgatttttgtttgtaatatgtatgtataaccaccttttatatcagtgaaaaatgctttcttcttgttacaagtatcatgagcaggaatactcatgttataaataaaataggctgaaataaagtatgataggctatttactaaaaaagcgaactcaatatgtaaagattgtgcaattactccgcccaaagaagcccccataatagacataaaaccattaattgtactagaaagagagttagcagttacgaaatgattttggtgtacgatattttttagggttgcttgtttagccggttcaaataaacaagaaagtacagataaacatatattagcaatgaaaataatctcaattttatagcctgcgagtaagtatgtaaggactagaattccccgtgtaatatcggtaaaaatcataatattctttttagagaaacgatctacaattccgcctatgaatggactaagaagaagctgtggtaaacttttacttataaaagtaagtgcgatcataaacggcgattccgttatgctgtagacaaatgttaataaagctaccgtatggaaccaatccccaagtacacttaatgtttgcccataaaatagtttattgaagtttttatttgttttaagaagtgtggaataagaaactgacataaatagattaatccttatgtaatgacgatgtttgaatttgttctttccactcacttaaatacactttttccgctgtgggaagtccaacaggtaattgtgcaatcaattctaaactatttccatcagggtcgttaaagtatacggctgcatgtgctaattccggaaaaacaatcggttcaattggttccattccaaagtcttttcgtgctgaaattcctttttgatttagccaatgaatcgcattttctaaatcatgtaaacttacttgaaaggcgatatgtcgtaaagaggggtgataattcactttgtattctgtgccttcccaaaggccgagccaactctcattttctttaatccaaaagaaagcaatattatctcctcttttatataattttagccctagtgattcataaaaaggtattgatacttttaagttgcggacaggtaaatgtgcttcgtaaagacctctaatcattgtaatcccccttagtaaaaatgtttcttattccatagtaaacaatatgttgctagttgaaatcgcaaataagagggatataaattcatacgaaagtatgaaaaaaacagctcatatttgagctgtttttctatagtttttagttcatttttcaaggataggatatattaatatccgtatccgccgccaccccaacagctacatccgatgatgattagaaggatgaatagtacgataagcaaagcaaatccaccgccgaaaccagcgcaacttccaccataactcatatgttttcctcctttttagtaagttaatctatatggttcatggactactatatacagtatgttttttgtatagaaaacgagccagtctcatttataattagacaaatgcctgtagattcattaggattgcatgttagtgatttgtaaataaacctttacgtaattcataatttaggcataaaaaataaaaaattgtaaaaaaaaccattttcttatttttttatgagagaatatgtactataattttacaagtaatattatgggaaaagggagttttagtatagagatggagatgggacaattaaaaaataaaatagaaaacaaaaagaaagagttaattcaacttgttgcgagacacggattggatcatgataaagttttgttatttagtcgtgatttagatatacttattaataagtttatgaatataaaagacaaagtgcataaataaaaaatttatagttttttatattaagatgtttcacagaaaggagaggacagtaattggaacatttacaggaagaattgtataaacaaataaaagaagaaaaaggtacagttacaattttcttaaagagtggcgttagaataataggagaagttgttggagtggataaatttacagttttaatcttagtggatggaaaacaacagcttatttataagcaggctatatcaacaataatgaaataagacactcttgttgagtgtcttatttcattattgcttgcatgcctcaacatcaatgccggcagcaattaacttcttttctccatcttgttcaataattttttgtaatttagataagaaagaatcaaagtttgtatgctttgctacttggaacgtcattttatgttcaattggtagccacgtatcaatatcagcttcgttatgctgaatttttacctcaagtttatcgagtgcattagcaacttttgcttcgtacgtttctttcgcttcaaactccatccataagtcatataattcctcgccgagagaacctgttaacgtttgtttaatatttaaaatagcctccagttcatttttttgtttttgtagctgtaattcgtgactattcattgtatcaaaagcaggaatatcaccagcttcggcttcgactaggtcgtgaataataaccattttaagtaatttctcaatacttactttttgatccaaataaggttcaactaaaatggccattagagacatccgccatgtatgttcggcaacactttcttgacgtccgttggaaagccagctatgtcgcatttcatattttagtttttctgctaatgcaatgacttgtaaaatgttgtgttccatcgtgatcctcctcatttattcataccataattctaatatagaaatgaaatgtgtcaattttatgagtatattgcgataaacagatgataagcgtataatacatgttatatgtgaaaacgtattattaaaataaaaaaatgttatataaaaatggaaaggaaagggcagaaatatgggagagaaaaatcaagtattagctagaccacaaagaagaaaaaggaagtttgatatttctagcccagtgggcattatagtaggtttcattatagtgatagcggcaattatgcttggtggcggtggaataaaagctttcaaaaactttttagatatttcatctattttaattgtcatagggggaacaacagcgacaattgttgtggcatatcgatttggagaaataaaaaaatatacgaaaagcatttttactgttttacatagaagagaagaagatttagaacagttaacggatttgtttgtcgatttttcgaaaaattctaaaaagaacggcttgctttctttagaggtagatggagagcaagtagacaatccttttattcaaaaaggaattcgattaatgttaagcggttacgatgaagatgaattaaaagaagtgttattgaaagatattgaaacggaagtgtatgagttaagaaaaggagcagcattattagataaaattggtgattttgctccagcttggggaatgattggtacgttaatcggtcttatcattatgctccaaaacttacaagatacatcgcaaattggtacaggaatggcagttgcgatgttaacgacattatatgggtctgtacttgcgaatatgattgcaatccctcttgcggaaaaagtatatcgtggtattgaagatttatatacagagaagaagtttgtaatagaagcaatttcagaattgtatcgtggacaaatcccttctaaattaaagttgaaactggatacatacgtatacgaaacaaaggtaaaaaaggtaaaaggagcagcctaatatttcaaggagtggtatgatgagtaaaggaccgcaaaagggatcgcctcgttggatgacgacttttacagatttaacgatgttattattaactttctttgtattactagttgctacatcaaagcaagatgcagtaaaattgtcaaagatgcttgaaaagtttagtgatacggggcaagtagatgcaaaagtaatggaaaatacaataccggatatttcacatgaaaaaaatgatgaaaaaatgatttcaaaaaagagaatggatgaattatataagaagttaaaagcatatgtagataataatggtattagtcaagtgaatgtatatcgagaggatacaggggtaagcgtcgttatagtagataatttaatatttgatacaggcgatgcgaacgttaagcccgaagcgaaagggataataagtcaattagttggattttttcaatccgtacctaacccaattgttgtagagggacatacagatagtagacctattcataacgagaaattcccttctaattgggagttatcttcagcacgagcggcaaatatgattcaccatttaattgaagtgtataatgtggacgataaaaggctagctgcggtaggatatgcagacacaaagccaattgtaccaaatgattcaccgcaaaactgggaaaaaaaccgtcgcgttgttatttatataaaagagtagtatattattattttaataataaaataataaaaacacgaaaattcttttaaaaaaatattaaattttatcattttattttgtataatgagtgagaatgataaggtgaaatattaagatatatttatacatagaaggagagaattaaaaagaatggcacataaaattttagtagtagacgatgcgatgtttatgcgaacgatgattaaaaacttattaaaaagtaatgctgaatttgaagttattggcgaagcagagaatggggtagaagcaattcaaaagtataaagaacttcaacctgatattgtaacattagatattactatgccagaaatggacgggcttgaagcattaaaagaaattattaaaattgattcaagtgcaaaggttgttatttgttctgcaatgggacaacaaggtatggtattagatgcaattaagggcggggcaaaagactttattgtaaagccattccaagcggatcgtgtaattgaagctttaacaaaagtagcaaatagttaatatagaaggggtgccacaaggaatcaaaacagtgatagcggatcgacgtgtggcccccttttttctcattgtaaaacactaaattgttatacataaatgaaatgtttgttagacaggtaggggataaaaatgcaaacagatctattaaatatatttttcgaagagtcagaagaacatttacagtcgctaaatgaaaatgtgctagtgttagaacaaaatcctgctgatatggatgttgtaggagaaatattccgatccgctcatacattcaaaggtatgtctgcgagcatggaatttacggaaatggctgatttaacgcataagatggaaaatgtgttagatgaaattcgtcatggaaatatagttgtaaatgcggatattattgatgtgatttttgagtgcattgataatttggagaagatggttgcagatgtgcaacaaggtggaatgggcaatattgatgtagcctcaactaaacagaaattagaagcattattgaacggcaatgtagaaactcctacggaacatatagagcaaaatcatatagacacggatgatgcagtttcgcatgaagtgcatataacagttgaacagcaagcaattttaaaagcggtacgtgctattatgtgtattgaagcattgcaaaatgtagggaatatacaaaaaacagctccgagtattgaagaaattgaagcagatgctttcggatttgaatttacagtatttatggatactgattgtagtatagaagaattgaaacaagtagtacttcatgtttctgaaattgagaaagtggaagtaaagcaaggagaacctatatcgaaggaagtagcttctaaaaaagtcgttacacaagaagttgtgcaagtagaaggaaagctacaaccagctgtggctacgcaggtagaatcaccaatagagccaacgaatcaaccttcaagtgctatgccagctaaaagtactacaaaaacgaaaaatgctaaagtggagaatcgttcaattcgtgttcaattagagaaaatcgaaagattaatgaatatgtttgaagaaagtgtaattgaacgtgggcgcattgatgaattggctcaaacgattcaaaacaaggagctaattgaacatttaaatcgattaggcgatatttcaaaagatattcaaaatgtactattaaatatgcgtatggtgccgattgaaactgtgttcaatcgtttcccgcgtatggtacgtatgttagcgaaagatttagggaaaaaaatcgatttacaaattacaggtgaagatactgaagtagataaaattgttattgatgaaatcggtgatccgctcgttcatttaattcgaaatgcaatcgatcacggtgttgaaactgttgaaaaacgacgtgatgcaggtaaaaatgagacaggtacgattaaattagaagcctttcatagtggaaatcatgtcgttattcaaattacggatgatggaaacggtattaataaagggaaagtattagaaaaagcgattaaaaatggcgttgtaactgaagcagatgcgaatagattaacagatcgtgaagtgtttgatcttattttccaaccgggatttagtacagctgaagttgtatcagatctttcaggacgcggtgtcggattagatgttgtaaaacatacgattcatagtttaggtggacatttaattattgattctgaggaaggaaagggaagtacatttagaattgaacttccattaacgttatctattattcaatctatgcttgttcaaacgaatgataagcgttatgctttacctcttggaaatatcgttgaagcaattcgaattaagagagaagacatccaatccttacaaggaaaagatgtattaaattatcgtaatcaaattattgaagtgaaacatttaagtactgtatttggtgaaaaaacagtagatgaggcgtttgcgtcatatgatggtcaaatggttcctgtgttaattgttcgtaacacacatcgcagctatggacttattgtaaacacaattatcggtcaaagagaaatagtcttaaagtcattaggtgacttctttgcagagagttctaactatttctctggtgcgacgattctcggtgatggacgagtgatcctcattttaaacccagaaggtttataataggaatgaaggaaagctccccacttgtatacaattggggagctttttggctaatcgttacgaatctaataatgggatacatagtaacgttttatactaatgagtttgctaaaataaaataagagtttatattatttgatagaaaaacagaaatgaggaggcagggaaaatgcctgagcaacacacaaaaggggatacgagcacgattgtgctagaaaaagaaaatgagcatttaacgccccaagaatgcgatattcttggcgaaattgcaaatatatcatttggttcagcttcgactgtattatcaacaattttaaataggcaagtaagcattactgctcctcgtatagagttggtagatttatatgattcaagagatgtcgaagttccacatgttgtattaaacattcattttacaaaaggattagatatggaaaaccttcttgttcttaagcaagatgttgcattgtccattgctgatttaatgatgatgggaacaggtgaagtcgaggacggaaaagaacttggtgaattagagctaagtgctgtacaagaagcgatgaatcaaatgatgggattcgcagctacatctatgtccgaattcttccaagatacagtagatatgtctccgccgacgattaaagttgtaaagttatcagaagaaatggagaaaatctctgaaatcgatgggaatcatacgattgttaaagtatcgtttgatttaaagatagataatcttgtaaactctaaacttgtacaaattgtttcagttgagcatgcgaaacaaatggtaaataaattaatgcaattatctggtggagtagaagaaacagacgaaccagcagaagtagtggaaactgagattgtagaagaaaaaattgaaaaagagcatttaacacaagaagagaaagatgttcttggtgaaattgcaaatatttcaattggttccgcttcaacagtattgtcaacacttttaaatcagccagtttcaattagtacaccaaatgtagaagcaatcaatgttcgtcattatgatggagtaccagtaccatttgttattttaaatgtcgactttgttgaagggctaaagaatgagaatgtatttgtatttacgaaagatgttgccttaacaatggtagatttaatgatgatgggaacaggggaagttgacccagaaaaagagcttactgaattagaactgagcggtattaaagaaattatgaaccaaatgatgggtcatgctgctacggcgatgtcagaaatgtttcaagaaaaaatggacatgacgccgccaaatgttaaatttgtaacgttaaaagaagaaatggaatatttgggagagtcaatggaagtggacgaactcgttcaaattacgttcaatcttgaaattggcgatttgcttcaatcgaagatgtatcaaattttgccaatttccgaagcgaaagaaatggtaaggcgacttctgtatccgatggtggaagaagaagagattgccacagaagaaattgaagaagaaaaaattgtagaaccagttgtgcaacctattgaatttaaagaagtaaaacaaatggaaccagtatatatggacacgtccattctacaaaatgtagaaatgaacgtgaaatttgtatttggaagtacagtgaaaacgattcaagatatattaagtttacaagaaaatgaagcagttgtactagatgaggatattgatgaaccgattcgtatttatgtaaatgatgtattagtggcgtatggtgaacttgtaaatgtagatggattttttggagtaaaagtgacgaaatcactataaggcattgaaataggagtttgaactagtagatgaaaaacgtaaagttttttctaatgagttggctatgcatacatgtgtgcttgttcttccccttgcaaagtcaggctgaggaacaaattgagtcagatcaaaaaataaatgaagtgaatgtacaagaagaaaataaggaatctcaagaatcgtcagaacaagtggaaacgaagcaagatgaagagaaacaaaaagaagcagagcaacaagaagtagtaaataaacaattgaatgaaagaaagatagaaacagaacaaggaattattacagtaaataagccggagcttaaagttggcgaagaagtgcgaattgctgtagaaccaaatgtgaaaaacattcaaagcatgaaaggtatattgcagttacaaaaaaatggcgagcaatatgcgcaagaaagaatactatcttttgagtatgatgaagaaacgaagatctgggttgctaactataaagcaggggattttgatttgcaaggtgattggaatcttcagctcgttcaaagttacaaagagaatgagaaagaagagctcataaaaaatgaagtgaaagtcccgctcattcgtattaaaaatgaaacgccaactatagataaagaattgccaaagttacagaaagttactattgatgaagtaaaagagaacttagttgaacgaaaacagggagattctatacatatacgagtaaaagcgtcagatatagaatcggttgtaaaagaagtgcgcgttacattaaaagggaaagaaaataaagagctttcgtttttattagactacaacaagcatgatatggattggcaaaaagtatttgaaataacagaagcattgccggctggatcatacgaattacttgtagagataatagatgcagcaggtaataaacttgttgaagaaagtgaatataccatttctgttttggcgccaaaaaacgaagatgataaaaagatagaagagaaagaagataaattagataataaactagaaaatgaattagaagataagaaagaaaatgagaagcaagaagatttgaaaatcaaaaacccgcttccagaagaaaaattgccagttgttcaaattccgaagcaagatgagaaagtaaataagtttataaaagaaccgttgaaagagaaagaggaatttacttacgttataaaagagccgttcgaagacaacaaggaagtacataaggcgaaggaccaaaaagagaaaaataacaaacaagttgtctctaaaaagaaagaacaaaaagaagaaacgaaagacaaggaagaagaaaaaggtgaacagggagtacaagcttcggatgtatttactatcatgtcaggtttattcgtactgtttttagttttaaagagtaataaagaatggggctaattatttcatagtagtggaggcgcttaaatggagattaaacgtacgacaattgaagataagacgctacaaccattaaaacagcctgcagctatttcggaacatgaaatccagaaagaacgaaagcgtagcaatttagtgtttactggacagtctaaaattatttcgaaaaataatgaaataggtattttacttgcaagtttaagtgatggaaagattatgaaggaaatactttctaaagagatggatacggtgttacaactttttaaaaagttacatacattatctcaagaaggaaagcaatcagaaaaagtgtttgaacaagtaattagaagcctacaaggacttattaagcaggcgcacataaaagaacttcctttgttagatggaacatatgatttcgctgaagtacaactatcatttggtagaaaagtacatattcctttactagatgtaagtgcactcatctctagagtggaaagtgattcctcagaaggaaatataaatttgatggtaacggttattactgcttatataacgaaattgtctaacgaaacgattttaattagcgttacagaccgcattgctaaagatcgggatgtaagtgtatggagagcgcttgcggaaatgaacatgacacaattatcacaggcattgaaacaaacgatgcaagaacataaatggtctatgacgtttctttttctcttcatatggattgtcggtattattttaattcgagttatgtaaaagaggtcgtcactccattgtgacgacctcttttatattttttcgtagaagaatgtatcaaatcgctgaagattgtaacgttcgggtgttaaaatttgttccgtactaccaacaaatagtacaccgccttttcgtaaagaacgactaaatttttcgtaaagttttattcttgcttcttctgtgaaatatatcattacattacgacaaataatcaaatcataatttgtatcgaatgactgcattaaaaggtcgtgttgtttaaacgagacgttttgtttaatgttttgatgcaatgaatatagatcattctcttttgtgaaatgacgttctttcaaatcagtaggtaattcctttaacgaacgttctgtatattgagcgcgttttgcggtttctaaaatatgaaaatcaagatctgttgcttgaatttcaaaacgaaatggagctagatgttttgataaaattaaagagagtgtatatggttcttcaccagcagcgcaagcggcactccatacctttaattttccgctattttgttcgagtaattttggtagtgctttcgactctaaagtttgccatcgttctttatttctaaaaaactctgaaacgttaattgtaatatagtcaataaaatttaaaaataaattttgatcagcgcgtaatttgtttaaaaaattagtgtagttttcgaagccttttctcgaaatgaaagcatcgattctacggcgcattctatcttgtttatatgaagcgatgtccatattgaattgttgtttaaaactcgctataaaatgatcgtaatcttgttcaattatcatatttacaatgggcacaataatgatattgtgcctccccctttacatcatacgaattttttgttcaaagctttttttcgtttgcttttcatgtaatcctggtaaatcataaatgacagcatcaatacctgcttcttttgcaacatcgacagggatgacagatgtatgtttgtcaccattataaaaacagagaactaaatcagtgtcttcaataatttgtttaacaaaaaacatataatctgatcggtaaatggagtcagaaggatgatcaaaagcaacatattcggctccgtgtttttttaagtaatcaacgacttcttgaaattcatctgttattgcttgcaatggttgcagcgtgtaaaggcataaattttgagcgagtctttcattctcaacgaaaaaacgaagaacctcattttcaatagatttataacataatatgtaaattttatgtttgtgagcatagtcagttaaaaattttttaatttcttcttgatctaatgctgttaattgatttgaaccacaaaggaaaatattcatagaattgtgccacctcatgctaaattgtaacatatcttttataaaaaataactgcaaaatattactgttcagagtataattataaataactggattttacgattaagtttaggaagaaataaaaaaaataaataggtgatatatatgctacgttctatctcgcataatccaattttatcgcatataccgcctgctactcaaatgccgaaagaagcaaatgtcaggacaggacttgcattttcggataatttgcatgcagatccgaaaaaagataaattactagaacaaatggaagcgtttgtcgataatattggagaaattaaagagaaaattgaaatggaattaacgcttgataatgtaatggaatacaaaaatacagtaaaatcatttttgaatttttacgtggataatgtattgcagtataaagatgtcatgtctcgtcacccgcgttacggatattcacagaaaatgacgattgtgaaacaggcagaaatgggattgaatgaattagaagatgttatgaatttaattaatacgaaaacaggacatttagaaatgttaaatcaaattggagaaatccatggtttaattgtgaatttagtcttgtaaaaggaaggaagctatatgtacatacaattatatgaaaaactcgttattattcaaaaagcgtatgaaaatattcaagcgcttggagagcaaatatatgagaatttaaaaaataaaaatgtaaatgcagttcaaaagttgcaagtagagcaattgcagtacattgatggtttaaaagggttatcaagctcatttgaagaaatggttgttcagttctgcaaagaacaaggggttgaatcgtttcgtgtaagtgcgttattttcgtatttttctcaagaagaaattgaaaaaatggaagaattacaaaaaaacgtaactgaattagaagagaatgtaaaaatgattcttttgaaaaatcaatattacttaaacgtactattaaaaactacagaaagtattgtggattctgtttctgaatataacttagagcgaaacaataattcgcaaatctttatgaatgaactattgtaaaggagaagtgaagctttatgagattatctgattataatacaccgctatcgggtatgttagcggctcaaatggggttacaaacaacgaaacaaaacttgtctaacattcatacaccgggttatgttcgtcaaatggtgaattacggatctgctggaggaagtaaagggtatgcaccagaacaaagaatagggtatggtgtacaaacgttaggtgttgatcgtattacagatgaagtgaagacaaagcaatataatgatcaaatgtcacagttctcttactatgcatatatgaattctactttgtcgcgagtagagtctatggtaggaacgacaggtaaaaattcattatctagtttaatggatgggtttttcaatgcttttcgtgaagttgcaaaaaatccggagcaatcaaattactacgatacattaattgctgaaacggggaagttcacaagtcaagtaagtcgtcttgcgaaaaacttagatacagtggaagcacagacgacagaagatattgaagcgcatgttaatgaatttaatcgacttgctgctagtttagcagaagcgaatcataaaattgggcaagcaggtacacaagtaccaaatcaactattagatgaacgtgatcgtattatgacagaaatgtctaagtatgcagatatagaagtatcgtatgaagctacaaatcctaatattgcaagtgttaggatgaatggtgttttaactgtaaatggtcaagatacatacccacttcaattacagaaggataaaaagccaatgtctgtacaaatatctggaacagatatcccattaagtggtggaacaattttatcggcaattgatacgaaagcaaagattacaaattataaagataatctgaatgagtttgtaaattcgttaaaaaaacaagtgaataatactatgaagaaagagttttttgtaggagaagatgcgaagaagcttgaattgaatcctgattttataaaagatatttcaaaaatgaaaatttcggctgaaactgccaacaaccttgcggctattacagataaaggctataaggatggacttacatataagcaagccttagatcaatttttagttggtgtagcctctgataaaagttcagtaaatgcatatcaaaatattcataaggatttattagaaggtatccagcaagaaaagatgagcatcgagggcgtaaatatggaagaagaaatggttaatttaatggccttccagaagtacttcgtggcgaattctaaagctataactactatgaatgaagtgtttgatagtttgttttcgattattagataaggagtagtcatgtatagttggtaattggaaatatttaaggaggagatagaaatgagagtatctacatttcaaaatgcaaactgggcaaagaatcagttgatggatttaaatgtgcaacagcaataccaccgaaatcaagtaacctcagggaagaaaaaccttcttatgagtgaagatccacttgcagcaagtaaatcatttgcgattcaacattcattggcaaatatggagcaaatgcagaaagatatagcggattcaaaaaatgtattaacacaaactgaaaatactttacaaggtgttttgaaatctttaacaagagcagaccaattaacagtacaagcattaaatgggacaaatagtgaaaaagaattgcaggctattggtgtagagattgatcaaattttaaaacaggtcgtctatttagcgaatacaaaagaacaaggtcgttatattttcggtggtgatagtgcaaaaaatccgccatttacagaagatggtacgtaccaaggtggaaaaaatgatgtgaactggcaattaaatgacggttatgaattcaaagcgttccgtaacggagaagcattattatccccggttataaaaacgttaaaacagatgagtgaagcgatgaaaaacggtgaccaaaaagcattaaaaccgttattggaaggaaataagcaaaacttagatggcatcattaaccgtacaactgaagttggttcgacaatgaacacaatggagacgtttaaaacaattttaaacgagcaaaatgtagcacttcaagaaaaccgtaaagaaattgaggatgttgatttagctgtcgcaatttctgatttagcttatataaacgcaacatacgaagcaacattaaaagctgttagtacgatgagtaaaacgagtattttagattacatgtaaatgataaggagtgaaaaatatggcagggacaatatctaattatggtgacagacagcaaatatggaatttaggaaataacataatagatacaaagaagttagtagatttagagttacaagcattggaaatgaaaaaatcaccatacactacacaaaaacaaacgttaacaaatgaaaacaaagtttatgcgagcatgaaaaaagagtttgcaaattttgtgcaagtattcaaagatttaaacacatttaaaggtgatgaaaagaaaacaactttatccaaagatggttttatgacagcacaggcggatgctgctgcaattcctggaacatatacaattacagtagagcgagtagcagaaaggcatcaaataactacagctccacttactcccccaaaaactcctgaaggtacggagcaaaagtttagtttagatttaaaacttggagtagatgatgtatttcagataaatggaaaagaagttaaaatctcaaaagatatgacgtataaagatcttgtcaataagataaataatgggaattatggtgcatcagtatacacattaggggatcaactatttttcacatcgactactgcaggagaaactggagagctgaaattaacggatggcgccaatggttttttacaaaatatagggttagttacttctgcgaaaaatccggatggaacgaatgttgttgcacatcaagtgacaggagcgataaatgctgagtatacaataaacggaattaaaggaactagtaaaacaaataagattgatacaattccaggattaactattaacttagaaaaggtaactacagagccaattaaattaactatcgaagattcagatataaaaaattcgatagatttaatcaaaaaaatgaaagatgagtataataacgctgttaaaagtttagatttattttctggtgaaaatggagtaatgcaagggaataatgtttcatttgctatcagtaatgcaatgacaagcatttttaaattttcacaagatgataagtatttattttcttttggaattcaaattgataaaacaggaaatatgactcttgatgaagaaaaattgaaaatagcttttaaagagaatccagaatctacaaaacaatttttctttggctttaatggtattggtcatgatatagataaaaagcttgagggaatctttggagatgaagggattatcggaaaacgctctaaaagtattgaaaagcaagtgactgatttagagagaaaaattcaagatattgatacaattaataagaaaaaacaagaatcaattattgataaatatgcaaagttggaaagccagctagcattgcttgatagtcagctgcagacaatcaaagcaatgacaaaaaccaaaagtgatgattaatgaaagttgaggaagtgattatatgcaagcatggcaacgttatatgcaaaatgatattatgacgagtaatccgattaaaaatacaatatttatttatgaaagatgtatcgtagagtttcgtaaattagaagaacttttaaatacatttaaacttcaagaaggagacgaccttcttgaaaagttagaacgtatatttgaagagttgaagcttcaattaaatcctgatatttcaaaagatttatatgacggtctatttggtttatacgattggattagcattcaaattcaaacgatgaaagtaacgcgtgaagcaaaagacattgatgcgattgtacaagtgttacaagatttaatagacggttaccgtggagcacttgaaaatgaacaatgatatttatcgaacgtttgtcagctgttttaatgaaatcggtgaattacaagtgtcagatgaagagtttgctgagaagagtgagatgttaaatcgttggatgatgacactagatgaagaaagacgtgcacaagttgcagcagaagtaagcccattcattattaaggcagcgcagcatattcgtgataagcaaaagattttggaagaaatgattatggaaaatgatgggcgaatgaaggctaattcattttacggtaaatattaataataacgtctggaaacagattccccttttaaaagggggtctattccttcgtttacataaagaactccgctgattgaggtttcattttatgactgtgatgaaataataattgtaatctaaataatagaaaaatggactttagtttgtagtttatatattgaaatgttctatagattactatgtgtatacagttttttgcattctttttctatatttttgtatttttctaaagacaacaatgaaaaaatggaataaaatatgtaagggtacataatagtaaatattttaataaacgcatataagaaaataaataatgaagtgaaacttctatcagtggatcattacgttagaaaaggaagggtgtggaatatgccagatttagtgagtgatgtaagccattatatgaattatttagtgacgaaacgaaatactgtttctagtaatattgcaaatgcgaatacacctggctataaagcacaagatgtaacatttgctgagcagatgaataaaagtagtgcgttatataaaaataatgcggctgatttaaagagcaatccagatttatatcaaacgaatgaaatgcacttaccgacagtaaatacgaaaaatacatatgcaaagattcaaacaaaatcaatgcaaacgaataaagacggaaatagtgtggatgtaacgacagaaatgctagatttaatgaaagcaaatcagttatacggtatttcaattaacgcaattaatacacaatatgcaattaaccaagcggcacgcggacgttaaaagtagaaggagagacaacggatgtttcaggcaattaatgcaagtggctcagggctaacgacagcgagaaagtggatggaagttacttctaacaatattgtaaatgcgaatacgacggcggctccgggggcagatttatatgagcgtcgtagtgtggtgctagaatcaaacaatagttttgcaagtatgttagatggggctcctactaatggagtaaaaataaaaagtattgaagcagacaaaacggaaaatttagtgtatgatccgacgcatccgcacgcaaatgaagaaggatatgtacgttatcccaatattgatgtaactgctgaaatgacgaatgtaatggttgctcaaaaaatgtatgaagcgaatacgagtgtattaaatgcaaataaaaaaatgcttgataaagatttagaaatcggccgaggataagggggaagataataatatgaaaatccaaccaatgttacatacacaaccatttggagcaattcagtcaattggtgcaccgaagacttctcaaacacctgtagttgaggggaaaaagtttattgatttattggaagatatgaatcaaacgcaaaacaatgcgcaaacagcagtatatgatttactaactaaaggggtaggagaaacacatgacgttttaattcagcaaaagaaagctgaatctcaaatgaaaacggctgctctcgtacgtgataatcttattgaaaattataagtcactaattaatatgcaaatttaggaaagtggacgggtgtgtttaaatggaaaagatgaaaaatgttatccaatcgttaaaaacatggcataagttagtaatcggtgctgcgcttttagcgattgtaacaggagcacttttatacttcaccttgccagataaatatgttgttgtatatcaaaatttaaatgatgcagataaacaagagattacagcagaattatcgaagttaggtgtcgattatcaattagcggccgatggttcgattcgtgtgcaaaagaatgatgctccatgggttcgaaaagaaatgaatgggatgggcttaccgtttaattcgaaaagcggtgaagaaattttattagaaagctcgctcggttcaagtgagcaagataaaaaaatgaagcaaattgtcggtacgaagaagcaattggagcaagatattgtaagaaactttgcgacagttgaaacggcaaatgttcaaattacattgcctgaaaaagagacaatttttgatgaagaaaaagcaaaaggaacagcggcgattacggttggagtgaagcgtggacaattgttaacagctgatcaagttgcaggtatacagcaaatgattagtgcagcggttcctggtgtgaaagcagaagaagtaagtgttattgatagtaaaaaaggtgttatctcaaaaggagcagatgaagcacattctagtagttcctcttcttatgagaaagaagttgagatgcagcaccaacttgaaggtaaattaaagcaagacattgatgcaacattaatgacgatgtttaaaccgaatgaatataaagtgaatacgaaagtatctgtaaactacgatgaagttacacgtcagtcagagaagtatggtgataaaggtgtacttcgtagtaaacaagagcaagaggaaagctctactgcgcaagaaggggcagatacgaagcaaggtgctggtattacagcgaacggtgaagtgccaaactacggtacgaacaataatcaaaatggtaaagttgtctatgataataaaaatggtaacaaaatcgaaaactatgaaatagataaaacagttgaaacaattaagaaacacccagaattaacgaaaacaaatgttgttgtatgggtagataatgatacgctagtaaaacgtaaaattgatatgacaacttttaaagaagcaatcggaacagcggcaggacttcaagctgatccgaacggtaactttataaatggtcaagttaacgttgtaactgttcagttcgatcagccgaaagccgaaaaagagaaagagccagaaaaaagtggtatgaactggtggttattcggtggaattacagctggcttattagcgattggtggcctagtatggttcttattagcaagacgtaagagaaagaaagaagaagaggaatatgaagaatacttagtagaagaggaaattgctgcaagtaatgaaagtatcttggaaattcctgaagaaaaaatagtgccagagccaaaacctgaaccagaagaaccgaaagaaccaacgttagatgaacaagtgcaggatgctacgaaagaacatgtagaaggaactgcaaaagtaattaaaaaatggttaaacggacagtaagggaggaacaacgatgttagatgaaatctcctccaaagaaaaagctgccatccttattcgtacattagaagaaggggtggcagcaaaagtcattgaatatatgacagctgaggaaaaagaagtattacttcgtgaaatcgcaaagtttcgtgtatacaaaccagaaacgttagaaaatgtactaggagagttcttatatgaactaaatgtaaaagaattgaacttagtcactccagataaagaatacattcgtcgcatatttaaaaacatgccagaagacgaactggaaaaattattggaagatctttggtataacaaagataatccgtttgagttcttaaattcacttacagatttagagccacttcttacagtgcttaatgatgagtcaccacaaacaattgcaattatcgcttcttatattaaaccgcaacttgcgtctcaattaattgagagattgccagatcataagcgcgttgaaacggtaatgggtatagcgaaactagaacaagttgatggtgagttaattaatcaaattggtgagttgttaaaatcgaaattaaataatatggcatttagtgcaattaataaaactgatggcttgaaaacaatcgtaaatattttaaataatgtttcacgaggtgttgaaaaaacagtctttcaaaagctggatgaagtcgattatgagttatctgagaaaattaaagaaaatatgtttgtctttgaagacttacttggtcttgaagatcttgcgcttcgccgtgtattagaagaaattacagataacggtgttcttgcgaaagcacttaaaattgcaaaagaagaaattaaagagaaattatttacatgtatgtcttcaaaccgtaaagagatgattctagaagaattagatggcttaggaccgcttaagatgacggatgctgaaaaagcgcagcaaacgatcactggtacagtgaaaaagctagagaaagaaggaagaattatcgttcaaagaggtgaagaggatgtccttatttaaaaacagaattccgaagaattctgtttctttttctgaagaaacgtatgaattacaatttccaaaaccagcttcaattcaaatagaagaggaagaattacaagctgatcatgcagaacttcgcgcccagcaagaatcgttacatatggaaatgaatcagctaaggcaagagaagcaaatgctagaacgagagcggcagcagttattacaagataaagaacaatttcaaatgcatattcatgagcaactggaacagatggaagcagcgcgtgtgcaatttcaaaaagaacaacaagaaacagcgtatgaatggacagagttattatgggatcaatcttttcatctagcagaaaaaatcgtgaatcaagcggtagattcacgattgcttgatgtgttacctattttaactggcatcgtgcaaacattgccaacttcgtttgaaaaattaatcattacagtacatccagaaacgtttgaacgtattcaagaagagaaggaaaatacgaaagaatattggttactacaattagtagaatggaaatatgatttctccctgcagtttggtgaatttgttctggaagaagagaaagagttctttaaatttaaatttgcacctatatttgcgaaacttcgtcagaaatgggaagaag

(The sequence listing continues in the following parts.)

1. A bacterial strain comprising:
a B. thuringiensis strain which is phenotypically stable and has increased virulence compared to the wild-type strain, whereby the increased virulence has been achieved by the exposure of the strain to a mutagen during one or more passages.

2. The B. thuringiensis strain of claim 1, wherein the mutagen comprises ethyl methanesulfonate (EMS).

3. The B. thuringiensis strain of claim 1, e wherein the strain is a pesticide.

4. The B. thuringiensis strain of claim 3, wherein the pesticide is toxic to one or more of the following: aphids, other Hemipteran pests, thrips, Lepidopteran larvae, Dipteran larvae, Coleopteran larvae, spider mites, locusts, crickets, ants, cockroaches, flies, wasps, termites woodworm, wood ants, bookworms, silverfish, carpet beetles, clothes moths, gypsy moths, chiggers, Sarcoptes scabiei, ticks, mites, lice, fleas, bed bugs, mosquitoes, tsetse flies, kissing bugs, root-knot nematode, soybean cyst nematode, potato cyst nematode, slugs, snails, and the diamondback moth Plutella xylostella and its larvae.

5. (canceled)

6. The B. thuringiensis strain of claim 3, wherein the pesticide is applied to, near to, or in the soil of, cruciferous plants.

7. The B. thuringiensis strain of claim 1, wherein the B. thuringiensis strain comprises Bacillus thuringiensis entomocidus, Bacillus thuringiensis aizawai or Bacillus thuringiensis kurstaki.

8. A composition comprising the B. thuringiensis strain according to claim 1.

9. The composition according to claim 8, wherein the B. thuringiensis strain is in the form of spores or crystals.

10. The composition according to claim 8, wherein the composition is in the form of a solid or a liquid.

11. The composition according to claim 8, wherein the composition further comprises one or more of the following ingredients: wetting agents, thickeners, viscosity modifying agents, stabilisers and surfactant and a dispersing medium such as water or edible oils.

12. The composition according to claim 8, wherein the composition is a pesticide.

13. The composition according to claim 8, wherein the composition is applied to plants, soil surface and/or into the soil itself by spraying, spreading or sprinkling.

14. A method for improving virulence of microbial pesticides comprising:
(a) splitting a population of pests into subpopulations;
(b) exposing the subpopulations of pests to one or more microbial pesticides;
(c) selecting pest cadavers from the subpopulations with highest mortality;
(d) inoculating sporulation media with the pest cadavers so as to provide sufficient readily quantifiable inoculum for a subsequent round of infection;
(e) purifying and quantifying microbial spores from the selected cadavers so as to identify one or more microbial pesticides having improved virulence; and
wherein the microbial pesticide is exposed to a mutagen.

15. The method according to claim 14, further comprising using microbial spores from step (e) to infect one or more second pest populations.

16. The method according to claim 14, wherein steps (a) to (e) are repeated at least once, and optionally, the microbial pesticide is repeatedly exposed to the mutagen.

17. The method according to claim 14, wherein the cadavers are selected during step (c) on the basis of total mortality of the pest population reaching in the range of 25-30%.

18. The method according to claim 14, wherein a single clone is selected from the purified microbial spores of step (e) to infect further pest populations.

19. The method according to claim 18, wherein a single clone is selected for further infection at least twice per 5 passages.

20-24. (canceled)

25. The method according to claim 14, wherein the mutagen comprises ethyl methanesulfonate (EMS).

26-29. (canceled)

30. The method according to claim 14 wherein the microbial pesticide comprises a bacterium, and the bacterium is mutated by inactivation or disruption of a mutS gene.

31-36. (canceled)
